(19) United States
(12) Patent Application Publication
(10) Pub. No.: US 2017/0247467 A1
(43) Pub. Date: Aug. 31, 2017

(54) BISPECIFIC ANTIBODIES WITH TETRAVALENCY FOR A COSTIMULATORY TNF RECEPTOR

(71) Applicant: Hoffmann-La Roche Inc., Little Falls, NJ (US)

(72) Inventors: MARIA AMANN, SCHLIEREN (CH); PETER BRUENKER, SCHLIEREN (CH); CHRISTINA CLAUS, SCHLIEREN (CH); CLAUDIA FERRARA KOLLER, SCHLIEREN (CH); SANDRA GRAU-RICHARDS, SCHLIEREN (CH); RALF HOSSE, SCHLIEREN (CH); CHRISTIAN KLEIN, SCHLIEREN (CH); VIKTOR LEVITSKI, SCHLIEREN (CH); SAMUEL MOSER, SCHLIEREN (CH); PABLO UMANA, SCHLIEREN (CH)

(73) Assignee: Hoffmann-La Roche Inc., Little Falls, NJ (US)

(21) Appl. No.: 15/280,386

(22) Filed: Sep. 29, 2016

(30) Foreign Application Priority Data
Oct. 7, 2015 (EP) 15188809.6

(51) Int. Cl. C07K 16/40; C07K 16/28

(52) U.S. Cl. CPC C07K 16/40; C07K 16/2875; C07K 16/2878; C07K 2317/52; C07K 2317/565; C07K 2317/56; C07K 2317/31; C07K 2317/55; C07K 2317/522; C07K 2317/35; C07K 2317/73; C07K 2317/21; C07K 2317/92

(57) ABSTRACT

The invention relates to novel bispecific antigen binding molecules, comprising (a) four moieties capable of specific binding to a costimulatory TNF receptor family member, (b) at least one moiety capable of specific binding to a target cell antigen, and (c) a Fc domain composed of a first and a second subunit capable of stable association, and to methods of producing these molecules and to methods of using the same.

### CROSS REFERENCE TO RELATED APPLICATIONS

[0001] This application claims the benefit of priority under 35 U.S.C. §119 to European Patent Application No. 15188809.6, filed Oct. 7, 2015, which application is hereby incorporated by reference in its entirety.

### SEQUENCE LISTING

[0002] The instant application contains a Sequence Listing submitted via EFS-Web and is hereby incorporated by reference in its entirety. Said ASCII copy, created on Sep. 16, 2016, is named P33117US_SeqList.txt, and is 943,530 bytes in size.

### FIELD OF THE INVENTION

[0003] The invention relates to novel bispecific antigen binding molecules, comprising (a) four moieties capable of specific binding to a costimulatory TNF receptor superfamily member, (b) at least one moiety capable of specific binding to a target cell antigen, and (c) a Fc domain composed of a first and a second subunit capable of stable association The invention further relates to methods of producing these molecules and to methods of using the same.

### BACKGROUND

[0004] Several members of the tumor necrosis factor receptor (TNFR) superfamily function after initial T cell activation to sustain T cell responses and thus have pivotal roles in the organization and function of the immune system. CD27, 4-1BB (CD137), OX40 (CD134), HVEM, CD30, and GITR can have costimulatory effects on T cells, meaning that they sustain T-cell responses after initial T cell activation (Watts T. H. (2005) Annu. Rev. Immunol. 23, 23-68). The effects of these costimulatory TNFR superfamily members (herein called TNFR family members) can often be functionally, temporally, or spatially segregated from those of CD28 and from each other. The sequential and transient regulation of T cell activation/survival signals by different costimulators may function to allow longevity of the response while maintaining tight control of T cell survival. Depending on the disease condition, stimulation via costimulatory TNF superfamily members can exacerbate or ameliorate disease. Despite these complexities, stimulation or blockade of TNFR family costimulators shows promise for several therapeutic applications, including cancer, infectious disease, transplantation, and autoimmunity.

[0005] Among several costimulatory molecules, the tumor necrosis factor (TNF) receptor superfamily member OX40 (CD134) plays a key role in the survival and homeostasis of effector and memory T cells (Croft M. et al. (2009), Immunological Reviews 229, 173-191). OX40 (CD134) is expressed in several types of cells and regulates immune responses against infections, tumors and self-antigens and its expression has been demonstrated on the surface of T-cells, NKT-cells and NK-cells as well as neutrophils (Baumann R. et al. (2004), Eur. J. Immunol. 34, 2268-2275) and shown to be strictly inducible or strongly upregulated in response to various stimulatory signals. Functional activity of the molecule has been demonstrated in every OX40-expressing cell type suggesting complex regulation of OX40-mediated activity in vivo. Combined with T-cell receptor triggering, OX40 engagement on T-cells by its natural ligand or agonistic antibodies leads to synergistic activation of the PI3K and NFκB signaling pathways (Song J. et al. (2008) J. Immunology 180(11), 7240-7248). In turn, this results in enhanced proliferation, increased cytokine receptor and cytokine production and better survival of activated T-cells. In addition to its co-stimulatory activity in effector CD4⁺ or CD8⁺ T-cells, OX40 triggering has been recently shown to inhibit the development and immunosuppressive function of T regulatory cells. This effect is likely to be responsible, at least in part, for the enhancing activity of OX40 on anti-tumor or anti-microbial immune responses. Given that OX40 engagement can expand T-cell populations, promote cytokine secretion, and support T-cell memory, agonists including antibodies and soluble forms of the ligand OX40L have been used successfully in a variety of preclinical tumor models (Weinberg et al. (2000), J. Immunol. 164, 2160-2169).

[0006] Glucocorticoid-induced TNF receptor-related gene (GITR; TNFRSF18), another receptor in the TNF receptor superfamily, is considered as a marker for Tregs and activated effector T cells (Petrillo et al. (2015), Autoimmun Rev. 14, 117-26). GITR triggering induces both pro- and anti-apoptotic effects, abrogates the suppressive activity of Treg cells and costimulates responder T cells, with the latter activities over-stimulating the immune system (Nocentini et al. (2005), Eur. J. Immunol. 35, 1016-1022). It has been shown that an agonistic monoclonal antibody against murine GITR effectively induced tumor-specific immunity and reduced established tumors in a mouse syngeneic tumor model (Ko et al. (2005), J. Exp. Med. 202, 885-891). There is however a structural difference between murine and human GITR. Murine GITR is a dimer whereas human GITR is a trimer. Based on this structural complexity it has been suggested that anti-GITR antibodies per se are poor GITR agonists and that for the activation of CD4⁺ and CD8⁺ T cells increased FcR effector function is necessary. Thus, there is a need for the provision of anti-GITR antibodies in a new format that is independent from increased FcR effector function and nevertheless able to activate trimeric human GITR.

[0007] 4-1BB (CD137), a member of the TNF receptor superfamily, has been first identified as a molecule whose expression is induced by T-cell activation (Kwon Y. H. and Weissman S. M. (1989), Proc. Natl. Acad. Sci. USA 86, 1963-1967). Subsequent studies demonstrated expression of 4-1BB in T- and B-lymphocytes (Snell L. M. et al. (2011) Immunol. Rev. 244, 197-217 or Zhang X. et al. (2010), J. Immunol. 184, 787-795), NK-cells (Lin W. et al. (2008), Blood 112, 699-707, NKT-cells (Kim D. H. et al. (2008), J. Immunol. 180, 2062-2068), monocytes (Kienzle G. and von Kempis J. (2000), Int. Immunol. 12, 73-82, or Schwarz H. et al. (1995), Blood 85, 1043-1052), neutrophils (Heinisch I. V. et al. (2000), Eur. J. Immunol. 30, 3441-3446), mast (Nishimoto H. et al. (2005), Blood 106, 4241-4248), and dendritic cells as well as cells of non-hematopoietic origin such as endothelial and smooth muscle cells (Broll K. et al. (2001), Am. J. Clin. Pathol. 115, 543-549 or Olofsson P. S. et al. (2008), Circulation 117, 1292-1301). Expression of 4-1BB in different cell types is mostly inducible and driven by various stimulatory signals, such as T-cell receptor (TCR) or B-cell receptor triggering, as well as signaling induced through co-stimulatory molecules or receptors of pro-inflammatory cytokines (Diehl L. et al. (2002), J. Immunol. 168, 3755-3762; von Kempis J. et al. (1997), Osteoarthritis Cartilage 5, 394-406; Zhang X. et al. (2010), J. Immunol. 184, 787-795).

[0008] CD137 signaling is known to stimulate IFNγ secretion and proliferation of NK cells (Buechele C. et al. (2012), Eur. J. Immunol. 42, 737-748; Lin W. et al. (2008), Blood 112, 699-707; Melero I. et al. (1998), Cell Immunol. 190, 167-172) as well as to promote DC activation as indicated by their increased survival and capacity to secret cytokines and upregulate co-stimulatory molecules (Choi B. K. et al. (2009), J. Immunol. 182, 4107-4115; Futagawa T. et al. (2002), Int. Immunol. 14, 275-286; Wilcox R. A. et al. (2002), J. Immunol. 168, 4262-4267). However, CD137 is best characterized as a co-stimulatory molecule which modulates TCR-induced activation in both the CD4+ and CD8+ subsets of T-cells. In combination with TCR triggering, agonistic 4-1BB-specific antibodies enhance proliferation of T-cells, stimulate lymphokine secretion and decrease sensitivity of T-lymphocytes to activation-induced cells death (Snell L. M. et al. (2011) Immunol. Rev. 244, 197-217). In line with these co-stimulatory effects of 4-1BB antibodies on T-cells in vitro, their administration to tumor bearing mice leads to potent anti-tumor effects in many experimental tumor models (Melero I. et al. (1997), Nat. Med. 3, 682-685; Narazaki H. et al. (2010), Blood 115, 1941-1948). In vivo depletion experiments demonstrated that CD8+ T-cells play the most critical role in anti-tumoral effect of 4-1BB-specific antibodies. However, depending on the tumor model or combination therapy, which includes anti-4-1BB, contributions of other types of cells such as DCs, NK-cells or CD4+ T-cells have been reported (Murillo 0. et al. (2009), Eur. J. Immunol. 39, 2424-2436; Stagg J. et al. (2011), Proc. Natl. Acad. Sci. USA 108, 7142-7147).

[0009] In addition to their direct effects on different lymphocyte subsets, 4-1BB agonists can also induce infiltration and retention of activated T-cells in the tumor through 4-1BB-mediated upregulation of intercellular adhesion molecule 1 (ICAM1) and vascular cell adhesion molecule 1 (VCAM1) on tumor vascular endothelium (Palazon A. et al. (2011), Cancer Res. 71, 801-811). 4-1BB triggering may also reverse the state of T-cell anergy induced by exposure to soluble antigen that may contribute to disruption of immunological tolerance in the tumor micro-environment or during chronic infections (Wilcox R. A. et al. (2004), Blood 103, 177-184).

[0010] It appears that the immunomodulatory properties of 4-1BB agonistic antibodies in vivo require the presence of the wild type Fc-portion on the antibody molecule thereby implicating Fc-receptor binding as an important event required for the pharmacological activity of such reagents as has been described for agonistic antibodies specific to other apoptosis-inducing or immunomodulatory members of the TNFR-superfamily (Li F. and Ravetch J. V. (2011), Science 333, 1030-1034; Teng M. W. et al. (2009), J. Immunol. 183, 1911-1920). However, systemic administration of 4-1BB-specific agonistic antibodies with the functionally active Fc domain also induces expansion of CD8+ T-cells associated with liver toxicity (Dubrot J. et al. (2010), Cancer Immunol. Immunother. 59, 1223-1233) that is diminished or significantly ameliorated in the absence of functional Fc-receptors in mice. In human clinical trials (ClinicalTrials.gov, NCT00309023), Fc-competent 4-1BB agonistic antibodies (BMS-663513) administered once every three weeks for 12 weeks induced stabilization of the disease in patients with melanoma, ovarian or renal cell carcinoma. However, the same antibody given in another trial (NCT00612664) caused grade 4 hepatitis leading to termination of the trial (Simeone E. and Ascierto P. A. (2012), J. Immunotoxicology 9, 241-247). Thus, there is a need for new generation agonists that should not only effectively engage 4-1BB on the surface of hematopoietic and endothelial cells but also be capable of achieving that through mechanisms other than binding to Fc-receptors in order to avoid uncontrollable side effects.

[0011] The available pre-clinical and clinical data clearly demonstrate that there is a high clinical need for effective agonists of costimulatory TNFR family members such as Ox40 and 4-1BB that are able to induce and enhance effective endogenous immune responses to cancer. However, almost never are the effects limited to a single cell type or acting via a single mechanism and studies designed to elucidate inter- and intracellular signaling mechanisms have revealed increasing levels of complexity. Thus, there is a need of “targeted” agonists that preferably act on a single cell type. The antigen binding molecules of the invention combine a moiety capable of preferred binding to tumor-specific or tumor-associated targets with a moiety capable of agonistic binding to costimulatory TNF receptors. The antigen binding molecules of this invention may be able to trigger TNF receptors not only effectively, but also very selectively at the desired site thereby reducing undesirable side effects.

### SUMMARY OF THE INVENTION

[0012] The present invention relates to bispecific antigen binding molecules combining four moieties capable of specific binding to a costimulatory TNF receptor family member, i.e., four antigen binding sites that target costimulatory TNF receptors with at least one moiety capable of specific binding to a target cell antigen, i.e. with at least one antigen binding side targeting a target cell antigen. These bispecific antigen binding molecules are advantageous as they will preferably activate costimulatory TNF receptors at the site where the target cell antigen is expressed, due to their binding capability towards a target cell antigen.

[0013] In one aspect, the invention provides a bispecific antigen binding molecule, comprising

(a) four moieties capable of specific binding to a costimulatory TNF receptor family member,
(b) at least one moiety capable of specific binding to a target cell antigen, and
(c) a Fc domain composed of a first and a second subunit capable of stable association.

[0014] In one aspect, the invention provides a bispecific antigen binding molecule, wherein each two of the four moieties capable of specific binding to a costimulatory TNF receptor family member are fused to each other. Optionally, they are fused to each other via a peptide linker. In particular, provided is a bispecific antigen binding molecule, wherein each two of the four moieties capable of specific binding to a costimulatory TNF receptor family member are fused to each other and the C-terminus to the N-terminus of one of the subunits of the Fc domain, optionally they are connected at the C-terminus to the N-terminus of one of the subunits of the Fc domain via a peptide linker.

[0015] In a particular aspect, the invention provides a bispecific antigen binding molecule, wherein the molecule comprises two heavy chains and each of the heavy chains comprises variable domains of two moieties capable of specific binding to a costimulatory TNF receptor family member and a variable domain of a moiety capable of specific binding to a target cell antigen.

[0016] In a particular aspect, the bispecific antigen binding molecule comprises (a) four moieties capable of specific binding to a costimulatory TNF receptor family member, wherein the costimulatory TNF receptor family member is selected from the group consisting of OX40, 4-1BB and GITR, (b) at least one moiety capable of specific binding to a target cell antigen, and (c) a Fc domain composed of a first and a second subunit capable of stable association.

[0017] In one aspect, the costimulatory TNF receptor family member is OX40. Thus, in a particular aspect, the moiety capable of specific binding to a costimulatory TNF receptor family member binds to a polypeptide comprising the amino acid sequence of SEQ ID NO:1.

[0018] In a further aspect, provided is a bispecific antigen binding molecule, comprising four moieties capable of specific binding to OX40, wherein said moiety comprises a VH domain comprising
[0019] (i) a CDR-H1 comprising the amino acid sequence selected from the group consisting of SEQ ID NO:2 and SEQ ID NO:3,
[0020] (ii) a CDR-H2 comprising the amino acid sequence selected from the group consisting of SEQ ID NO:4 and SEQ ID NO:5, and
[0021] (iii) a CDR-H3 comprising the amino acid sequence selected from the group consisting of SEQ ID NO:6, SEQ ID NO:7, SEQ ID NO:8, SEQ ID NO: 9, SEQ ID NO:10, SEQ ID NO:11 and SEQ ID NO:12, and a VL domain comprising
[0022] (iv) a CDR-L1 comprising the amino acid sequence selected from the group consisting of SEQ ID NO:13, SEQ ID NO:14 and SEQ ID NO:15,
[0023] (v) a CDR-L2 comprising the amino acid sequence selected from the group consisting of SEQ ID NO:16, SEQ ID NO:17 and SEQ ID NO:18, and
[0024] (vi) a CDR-L3 comprising the amino acid sequence selected from the group consisting of SEQ ID NO:19, SEQ ID NO:20, SEQ ID NO:21, SEQ ID NO:22, SEQ ID NO:23 and SEQ ID NO:24.

[0025] In another aspect, the invention provides a bispecific antigen binding molecule, wherein each of the moieties capable of specific binding to OX40 comprises a heavy chain variable region VH comprising an amino acid sequence that is at least about 95%, 96%, 97%, 98%, 99% or 100% identical to an amino acid sequence selected from the group consisting of SEQ ID NO:25, SEQ ID NO: 27, SEQ ID NO:29, SEQ ID NO:31, SEQ ID NO:33, SEQ ID NO:35 and SEQ ID NO:37 and a light chain variable region VL comprising an amino acid sequence that is at least about 95%, 96%, 97%, 98%, 99% or 100% identical to an amino acid sequence of SEQ ID NO:26, SEQ ID NO: 28, SEQ ID NO:30, SEQ ID NO:30, SEQ ID NO:32, SEQ ID NO:34, SEQ ID NO:36 and SEQ ID NO:38.

[0026] Particularly, a bispecific antigen binding molecule is provided, wherein each of the moieties capable of specific binding to OX40 comprises
[0027] (i) a heavy chain variable region VH comprising an amino acid sequence of SEQ ID NO:25 and a light chain variable region VL comprising an amino acid sequence of SEQ ID NO:26,
[0028] (ii) a heavy chain variable region VH comprising an amino acid sequence of SEQ ID NO:27 and a light chain variable region VL comprising an amino acid sequence of SEQ ID NO:28,
[0029] (iii) a heavy chain variable region VH comprising an amino acid sequence of SEQ ID NO:29 and a light chain variable region VL comprising an amino acid sequence of SEQ ID NO:30,
[0030] (iv) a heavy chain variable region VH comprising an amino acid sequence of SEQ ID NO:31 and a light chain variable region VL comprising an amino acid sequence of SEQ ID NO:32,
[0031] (v) a heavy chain variable region VH comprising an amino acid sequence of SEQ ID NO:33 and a light chain variable region VL comprising an amino acid sequence of SEQ ID NO:34,
[0032] (vi) a heavy chain variable region VH comprising an amino acid sequence of SEQ ID NO:35 and a light chain variable region VL comprising an amino acid sequence of SEQ ID NO:36, or
[0033] (vii) a heavy chain variable region VH comprising an amino acid sequence of SEQ ID NO:37 and a light chain variable region VL comprising an amino acid sequence of SEQ ID NO:38.

[0034] In another aspect, the bispecific antigen binding molecule comprises (a) four moieties capable of specific binding to a costimulatory TNF receptor family member, (b) at least one moiety capable of specific binding to a target cell antigen, wherein the target cell antigen is selected from the group consisting of Fibroblast Activation Protein (FAP), Melanoma-associated Chondroitin Sulfate Proteoglycan (MCSP), Epidermal Growth Factor Receptor (EGFR), Carcinoembryonic Antigen (CEA), CD19, CD20 and CD33, and (c) a Fc domain composed of a first and a second subunit capable of stable association. More particularly, the target cell antigen is Fibroblast Activation Protein (FAP).

[0035] In a particular aspect, provided is a bispecific antigen binding molecule, wherein the moiety capable of specific binding to FAP comprises a VH domain comprising
[0036] (i) a CDR-H1 comprising the amino acid sequence selected from the group consisting of SEQ ID NO:39 and SEQ ID NO:40,
[0037] (ii) a CDR-H2 comprising the amino acid sequence selected from the group consisting of SEQ ID NO:41 and SEQ ID NO:42, and
[0038] (iii) a CDR-H3 comprising the amino acid sequence selected from the group consisting of SEQ ID NO:43 and SEQ ID NO:44, and a VL domain comprising
[0039] (iv) a CDR-L1 comprising the amino acid sequence selected from the group consisting of SEQ ID NO:45 and SEQ ID NO:46,
[0040] (v) a CDR-L2 comprising the amino acid sequence selected from the group consisting of SEQ ID NO:47 and SEQ ID NO:48, and
[0041] (vi) a CDR-L3 comprising the amino acid sequence selected from the group consisting of SEQ ID NO:49 and SEQ ID NO:50.

[0042] In another aspect, provided is a bispecific antigen binding molecule, wherein the moiety capable of specific binding to FAP comprises a VH domain comprising an amino acid sequence that is at least about 95%, 96%, 97%, 98%, 99% or 100% identical to the amino acid sequence of SEQ ID NO:51 or SEQ ID NO:53 and a light chain variable region comprising an amino acid sequence that is at least about 95%, 96%, 97%, 98%, 99% or 100% identical to the amino acid sequence of SEQ ID NO:52 or SEQ ID NO:54.

[0043] In a further aspect, the invention thus provides a bispecific antigen binding molecule, wherein
[0044] (i) each of the moieties capable of specific binding to OX40 comprises a heavy chain variable region VH comprising an amino acid sequence that is at least about 95%, 96%, 97%, 98%, 99% or 100% identical to the amino acid sequence of SEQ ID NO:25, SEQ ID NO: 27, SEQ ID NO:29, SEQ ID NO:31, SEQ ID NO:33, SEQ ID NO:35 or SEQ ID NO:37 and a light chain variable region comprising an amino acid sequence that is at least about 95%, 96%, 97%, 98%, 99% or 100% identical to the amino acid sequence of SEQ ID NO:26, SEQ ID NO: 28, SEQ ID NO:30, SEQ ID NO:32, SEQ ID NO:34, SEQ ID NO:36 or SEQ ID NO:38 and
[0045] (ii) the moiety capable of specific binding to FAP comprises a heavy chain variable region VH comprising an amino acid sequence that is at least about 95%, 96%, 97%, 98%, 99% or 100% identical to the amino acid sequence of SEQ ID NO:51 or SEQ ID NO:53 and a light chain variable region comprising an amino acid sequence that is at least about 95%, 96%, 97%, 98%, 99% or 100% identical to the amino acid sequence of SEQ ID NO:52 or SEQ ID NO:54.

[0046] In another aspect, the costimulatory TNF receptor family member is 4-1BB. Thus, in a particular aspect, the moiety capable of specific binding to a costimulatory TNF receptor family member binds to a polypeptide comprising the amino acid sequence of SEQ ID NO:239.

[0047] In a particular aspect, provided is a bispecific antigen binding molecule, comprising four moieties capable of specific binding to 4-1BB, wherein each of said moieties comprises a VH domain comprising
[0048] (i) a CDR-H1 comprising the amino acid sequence selected from the group consisting of SEQ ID NO:249 and SEQ ID NO:250,
[0049] (ii) a CDR-H2 comprising the amino acid sequence selected from the group consisting of SEQ ID NO:251 and SEQ ID NO:252, and
[0050] (iii) a CDR-H3 comprising the amino acid sequence selected from the group consisting of SEQ ID NO:253, SEQ ID NO:254, SEQ ID NO:255, SEQ ID NO: 256, and SEQ ID NO:257, and a VL domain comprising
[0051] (iv) a CDR-L1 comprising the amino acid sequence selected from the group consisting of SEQ ID NO:258 and SEQ ID NO:259,
[0052] (v) a CDR-L2 comprising the amino acid sequence selected from the group consisting of SEQ ID NO:260 and SEQ ID NO:261, and
[0053] (vi) a CDR-L3 comprising the amino acid sequence selected from the group consisting of SEQ ID NO:262, SEQ ID NO:263, SEQ ID NO:264, SEQ ID NO:265, and SEQ ID NO:266.

[0054] In a further aspect, provided is a bispecific antigen binding molecule, wherein each of the moieties capable of specific binding to 4-1BB comprises a heavy chain variable region VH comprising an amino acid sequence that is at least about 95%, 96%, 97%, 98%, 99% or 100% identical to an amino acid sequence selected from the group consisting of SEQ ID NO:267, SEQ ID NO: 269, SEQ ID NO:271, SEQ ID NO:273, and SEQ ID NO:275, and a light chain variable region VL comprising an amino acid sequence that is at least about 95%, 96%, 97%, 98%, 99% or 100% identical to an amino acid sequence selected from the group consisting of SEQ ID NO:268, SEQ ID NO: 270, SEQ ID NO:272, SEQ ID NO:274, and SEQ ID NO:276.

[0055] In an additional aspect, provided is a bispecific antigen binding molecule, wherein each of the moieties capable of specific binding to 4-1BB comprises
[0056] (i) a heavy chain variable region VH comprising an amino acid sequence of SEQ ID NO:267 and a light chain variable region VL comprising an amino acid sequence of SEQ ID NO:268,
[0057] (ii) a heavy chain variable region VH comprising an amino acid sequence of SEQ ID NO:269 and a light chain variable region VL comprising an amino acid sequence of SEQ ID NO:270,
[0058] (iii) a heavy chain variable region VH comprising an amino acid sequence of SEQ ID NO:271 and a light chain variable region VL comprising an amino acid sequence of SEQ ID NO:272,
[0059] (iv) a heavy chain variable region VH comprising an amino acid sequence of SEQ ID NO:273 and a light chain variable region VL comprising an amino acid sequence of SEQ ID NO:274, or
[0060] (v) a heavy chain variable region VH comprising an amino acid sequence of SEQ ID NO:275 and a light chain variable region VL comprising an amino acid sequence of SEQ ID NO:276.

[0061] Thus, in a further aspect, the invention provides a bispecific antigen binding molecule, wherein
[0062] (i) each of the moieties capable of specific binding to 4-1BB comprises a heavy chain variable region VH comprising an amino acid sequence that is at least about 95%, 96%, 97%, 98%, 99% or 100% identical to the amino acid sequence selected from the group consisting of SEQ ID NO:267, SEQ ID NO: 269, SEQ ID NO:271, SEQ ID NO:273, and SEQ ID NO:275 and a light chain variable region comprising an amino acid sequence that is at least about 95%, 96%, 97%, 98%, 99% or 100% identical to an amino acid sequence selected from the group consisting of SEQ ID NO:268, SEQ ID NO: 270, SEQ ID NO:272, SEQ ID NO:274, and SEQ ID NO:276, and
[0063] (ii) the moiety capable of specific binding to FAP comprises a heavy chain variable region VH comprising an amino acid sequence that is at least about 95%, 96%, 97%, 98%, 99% or 100% identical to the amino acid sequence of SEQ ID NO:51 or SEQ ID NO:53 and a light chain variable region comprising an amino acid sequence that is at least about 95%, 96%, 97%, 98%, 99% or 100% identical to the amino acid sequence of SEQ ID NO:52 or SEQ ID NO:54.

[0064] In yet another aspect, the invention provides a bispecific antigen binding molecule as defined herein before, wherein the costimulatory TNF receptor family member is GITR. Thus, in a particular aspect, the moiety capable of specific binding to a costimulatory TNF receptor family member binds to a polypeptide comprising the amino acid sequence of SEQ ID NO:357.

[0065] In one aspect, provided is a bispecific antigen binding molecule comprising four moieties capable of specific binding to GITR, wherein each of said moieties comprises a VH domain comprising a CDR-H1 comprising the amino acid sequence of SEQ ID NO:371, a CDR-H2 comprising the amino acid sequence of SEQ ID NO:372 and a CDR-H3 comprising the amino acid sequence of SEQ ID NO:373, and a VL domain comprising a CDR-L1 comprising the amino acid sequence of SEQ ID NO:374, a CDR-L2 comprising the amino acid sequence of SEQ ID NO:375 and a CDR-L3 comprising the amino acid sequence of SEQ ID NO:376.

[0066] In a further aspect, provided is a bispecific antigen binding molecule, wherein each of the moieties capable of specific binding to GITR comprises a heavy chain variable region VH comprising an amino acid sequence that is at least about 95%, 96%, 97%, 98%, 99% or 100% identical to an amino acid sequence of SEQ ID NO:383, and a light chain variable region VL comprising an amino acid sequence that is at least about 95%, 96%, 97%, 98%, 99% or 100% identical to an amino acid sequence of SEQ ID NO:384.

[0067] In a particular aspect, provided is a bispecific antigen binding molecule as defined herein before, wherein each of the moieties capable of specific binding to GITR comprises a heavy chain variable region VH comprising an amino acid sequence of SEQ ID NO:383 and a light chain variable region VL comprising an amino acid sequence of SEQ ID NO:384.

[0068] In another particular aspect, the invention provides a bispecific antigen binding molecule, wherein
[0069] (i) each of the moieties capable of specific binding to GITR comprises a heavy chain variable region VH comprising an amino acid sequence that is at least about 95%, 96%, 97%, 98%, 99% or 100% identical to the amino acid sequence of SEQ ID NO:383, and a light chain variable region comprising an amino acid sequence that is at least about 95%, 96%, 97%, 98%, 99% or 100% identical to an amino acid sequence of SEQ ID NO:384, and
[0070] (ii) the moiety capable of specific binding to FAP comprises a heavy chain variable region VH comprising an amino acid sequence that is at least about 95%, 96%, 97%, 98%, 99% or 100% identical to the amino acid sequence of SEQ ID NO:51 or SEQ ID NO:53 and a light chain variable region comprising an amino acid sequence that is at least about 95%, 96%, 97%, 98%, 99% or 100% identical to the amino acid sequence of SEQ ID NO:52 or SEQ ID NO:54.

[0071] In one aspect, provided is a bispecific antigen binding molecule as defined herein before, wherein the four moieties capable of specific binding to a costimulatory TNF receptor family member are antibody fragments selected from the group of Fab fragments, cross-Fab fragments, single-chain antibody molecules (e.g. scFv), antigen binding domains comprising the antibody light chain variable region (VL) and the antibody heavy chain variable region single domain antibodies (e.g. a VH).

[0072] In another aspect, provided is a bispecific antigen binding molecule as defined herein before, wherein the four moieties capable of specific binding to a costimulatory TNF receptor family member are Fab fragments and each two thereof are connected to each other.

[0073] In a further aspect, provided is a bispecific antigen binding molecule as described herein before, wherein a first Fab fragment capable of specific binding to a costimulatory TNF receptor family member is fused at the C-terminus of the CH1 domain to the VH domain of a second Fab fragment capable of specific binding to a costimulatory TNF receptor family member and a third Fab fragment capable of specific binding to a costimulatory TNF receptor family member is fused at the C-terminus of the CH1 domain to the VH domain of a fourth Fab fragment capable of specific binding to a costimulatory TNF receptor family member, optionally via a peptide linker.

[0074] In another aspect, the invention provides a bispecific antigen binding molecule, wherein in the Fab fragments capable of specific binding to a costimulatory TNF receptor family member in the constant domain CL the amino acid at position 124 is substituted independently by lysine (K), arginine (R) or histidine (H) (numbering according to Kabat EU Index), and in the constant domain CH1 the amino acids at positions 147 and 213 are substituted independently by glutamic acid (E) or aspartic acid (D) (numbering according to Kabat EU index).

[0075] In a further aspect, the invention relates to a bispecific antigen binding molecule as described herein before, wherein the bispecific antigen binding molecule is tetravalent for the costimulatory TNF receptor family member and monovalent for the target cell antigen.

[0076] In one aspect, provided is a bispecific antigen binding molecule, wherein the moiety capable of specific binding to a target cell antigen comprises a VH and VL domain and wherein the VH domain is connected via a peptide linker to the C-terminus of the first subunit of the Fc domain and the VL domain is connected via a peptide linker to the C-terminus of the second subunit of the Fc domain.

[0077] In another aspect, the invention provides a bispecific antigen binding, wherein the Fc domain comprises a modification promoting the association of the first and second subunit of the Fc domain. In particular, the first subunit of the Fc domain comprises knobs and the second subunit of the Fc domain comprises holes according to the knobs into holes method. More particularly, the first subunit of the Fc domain comprises the amino acid substitutions S354C and T366W (numbering according to Kabat EU index) and the second subunit of the Fc domain comprises the amino acid substitutions Y349C, T366S and Y407V (numbering according to Kabat EU index).

[0078] In another aspect, provided is a bispecific antigen binding molecule of the invention wherein said antigen binding molecule comprises

[0079] (i) a first heavy chain comprising an amino acid sequence of SEQ ID NO:213, a second heavy chain comprising an amino acid sequence of SEQ ID NO:214, and a light chain comprising an amino acid sequence of SEQ ID NO.157, or

[0080] (ii) a first heavy chain comprising an amino acid sequence of SEQ ID NO:217, a second heavy chain comprising an amino acid sequence of SEQ ID NO:218, and a light chain comprising an amino acid sequence of SEQ ID NO.157.

[0081] In addition, the invention relates to a bispecific antigen binding molecule, wherein the bispecific antigen binding molecule is tetravalent for the costimulatory TNF receptor family member and bivalent for the target cell antigen.

[0082] In one aspect, provided is a bispecific antigen binding molecule, wherein the two moieties capable of specific binding to a target cell antigen are Fab fragments or crossover Fab fragments.

[0083] In a further aspect, provided is a bispecific antigen binding molecule, wherein each of the Fab fragments or crossover Fab fragments capable of specific binding to a target cell antigen is fused at the N-terminus of the VH or VL domain via a peptide linker to the C-terminus of one of the subunits of the Fc domain.

[0084] In a particular aspect, provided is a bispecific antigen binding molecule, wherein the two moieties capable of specific binding to a target cell antigen are VH-VL crossover Fab fragments and are each fused at the N-terminus of the VL domain via a peptide linker to the C-terminus of one of the subunits of the Fc domain.

[0085] More particularly, provided is a bispecific antigen binding molecule, wherein said antigen binding molecule comprises (i) a heavy chain comprising an amino acid sequence of SEQ ID NO:227, a first light chain of SEQ ID NO:226 and a second light chain of SEQ ID NO:228, or (ii) a heavy chain comprising an amino acid sequence of SEQ ID NO:224, a first light chain of SEQ ID NO:226 and a second light chain of SEQ ID NO:225.

[0086] In yet another aspect, the invention provides a bispecific antigen binding, wherein the Fc domain is of human IgG1 subclass with the amino acid mutations L234A, L235A and P329G (numbering according to Kabat EU index).

[0087] According to another aspect of the invention, there is provided an isolated polynucleotide encoding a bispecific antigen binding molecule as described herein before. The invention further provides a vector, particularly an expression vector, comprising the isolated polynucleotide of the invention and a host cell comprising the isolated polynucleotide or the vector of the invention. In some aspects the host cell is a eukaryotic cell, particularly a mammalian cell.

[0088] In another aspect, provided is a method for producing a bispecific antigen binding molecule as described herein before, comprising the steps of (i) culturing the host cell of the invention under conditions suitable for expression of the antigen binding molecule, and (ii) recovering the antigen binding molecule. The invention also encompasses the bispecific antigen binding molecule, or the antibody that specifically binds to OX40 or the antibody that specifically binds to 4-1BB, or the antibody that specifically binds to GITR, produced by the method of the invention.

[0089] The invention further provides a pharmaceutical composition comprising a bispecific antigen binding molecule as described herein before and at least one pharmaceutically acceptable excipient.

[0090] Also encompassed by the invention is the bispecific antigen binding molecule as described herein before, or the pharmaceutical composition comprising the bispecific antigen binding molecule, for use as a medicament.

[0091] In one aspect, provided is a bispecific antigen binding molecule as described herein before or the pharmaceutical composition of the invention, for use

(i) in stimulating T cell response,
(ii) in supporting survival of activated T cells,
(iii) in the treatment of infections,
(iv) in the treatment of cancer,
(v) in delaying progression of cancer, or
(vi) in prolonging the survival of a patient suffering from cancer.

[0092] In a specific embodiment, provided is the bispecific antigen binding molecule as described herein before or the pharmaceutical composition of the invention, for use in the treatment of cancer. In another specific aspect, the invention provides the bispecific antigen binding molecule as described herein before for use in the treatment of cancer, wherein the bispecific antigen binding molecule is administered in combination with a chemotherapeutic agent, radiation and/or other agents for use in cancer immunotherapy.

[0093] In a further aspect, the invention provides a method of inhibiting the growth of tumor cells in an individual comprising administering to the individual an effective amount of the bispecific antigen binding molecule as described herein before, or the pharmaceutical composition of the invention, to inhibit the growth of the tumor cells.

[0094] Also provided is the use of the bispecific antigen binding molecule as described herein before for the manufacture of a medicament for the treatment of a disease in an individual in need thereof, in particular for the manufacture of a medicament for the treatment of cancer, as well as a method of treating a disease in an individual, comprising administering to said individual a therapeutically effective amount of a composition comprising the bispecific antigen binding molecule of the invention in a pharmaceutically acceptable form. In a specific aspect, the disease is cancer. In any of the above aspects the individual is a mammal, particularly a human.

### BRIEF DESCRIPTION OF THE DRAWINGS

[0095] FIG. 1A shows the monomeric form of Fc-linked TNF receptor antigen that was used for the preparation of TNF receptor antibodies. FIG. 1B shows a dimeric human TNF receptor antigen Fc fusion molecule with a C-terminal Ha tag that was used for the testing of the binding of TNF receptor antibodies in the presence of TNF ligand (ligand blocking property). FIG. 1C shows the schematic setup of the experiment described in Example 2.4.

[0096] FIGS. 2A, 2B, 2C, and 2D show the binding of anti-OX40 antibodies to activated human CD4+ and CD8+ T cells. OX40 is not expressed on resting human PBMCs (FIGS. 2A and 2C). After activation of human PBMCs, OX40 is up-regulated on CD4⁺ and CD8⁺ T cells (FIGS. 2B and 2D). OX40 expression on human CD8⁺ T cells is lower than on CD4⁺ T cells. The depicted clones varied in their binding strength (EC₅₀ values as well as signal strength) to OX40 positive cells. Shown is the binding as median of fluorescence intensity (MFI) of FITC labeled anti-human IgG Fcγ-specific goat IgG F(ab′)2 fragment which is used as secondary detection antibody. MFI was measured by flow cytometry and baseline corrected by subtracting the MFI of the blank control. The x-axis shows the concentration of antibody constructs. All OX40 clones do bind to activated, OX40 expressing human CD4⁺ T cells, and to a lower extent to activated human CD8⁺ T cells.

[0097] FIGS. 3A, 3B, 3C, and 3D show the binding of the anti-OX40 antibodies to activated mouse CD4+ and CD8⁺ T cells. OX40 was not detected on resting mouse splenocytes (FIGS. 3A and 3C). After activation OX40 is up-regulated on CD4⁺ and CD8⁺ T cells (FIGS. 3B and 3D). Mouse splenocytes were isolated by erythrolysis with ACK lysis buffer of mechanically-homogenized spleens obtained from 6-8 weeks old female C57BL/6 mice. Binding of anti-OX40 antibodies to cell surface proteins was detected with a goat anti-human IgG Fc-specific secondary antibody conjugated to FITC using FACS analysis. MFI was measured by flow cytometry and baseline corrected by subtracting the MFI of the blank control. The x-axis shows the concentration of antibody constructs. Only clone 20B7 does bind to activated, OX40 expressing mouse CD4⁺ and CD8⁺ T Cells, but not to resting T cells.

[0098] FIGS. 4A and 4B show the binding of anti-OX40 antibodies on cynomolgus activated CD4⁺ and CD8⁺ T cells, respectively. The depicted clones varied in their binding strength (EC₅₀ values as well as signal strength) to OX40 positive activated cynomolgus CD4+ T cells. OX40 expression on activated CD8+ T cells is low under this condition and hardly any binding of the selected clones was found. Binding of anti-OX40 antibodies to cell surface proteins was detected with a goat anti-human IgG Fc-specific secondary antibody conjugated to FITC using FACS analysis. MFI was measured by flow cytometry and baseline corrected by subtracting the MFI of the blank control. The x-axis shows the concentration of antibody constructs. All OX40 clones do bind to activated, OX40 expressing cynomolgus CD4⁺ T cells, and to a lower extent to activated cynomolgus CD8⁺ T cells.

[0099] FIGS. 5A and 5B show the lack of binding to OX40 negative tumor cells. The depicted clones showed no binding to OX40 negative U-78 MG (FIG. 5A) and WM266-4 tumor cells (FIG. 5B). Shown is the binding as median of fluorescence intensity (MFI) of FITC labeled anti-human IgG Fcγ-specific goat IgG F(ab′)2 fragment which is used as secondary detection antibody. MFI was measured by flow cytometry and baseline corrected by subtracting the MFI of the blank control. The x-axis shows the concentration of antibody constructs. All clones in an IgG format do not bind to OX40 negative tumor cells. Binding is specific for OX40 on activated leukocytes.

[0100] FIGS. 6A, 6B, 6C, 6D, 6E, and 6F show the interaction between anti-Ox40 antibodies 8H9 (FIG. 6A), 20 B7 (FIG. 6B), 1G4 (FIG. 6C), 49B4 (FIG. 6D), CLC-563 (FIG. 6E) and CLC-564 (FIG. 6F) and the preformed complex huOx40 Ligand/huOx40-Fc as measured by surface plasmon resonance.

[0101] FIGS. 7A and 7B show the effect of the anti-human OX40 antibodies of the invention on HeLa cells expressing human OX40 and reporter gene NF-κB-luciferase. Shown is the activation of NF-κB signaling pathway in the reporter cell line with various anti-OX40 binders in a P329GLALA huIgG1 format w/(FIG. 7B) or w/o (FIG. 7A) crosslinking by secondary-antibody. The reporter cells were cultured for 6 hours in the presence of anti-OX40 constructs at the indicated concentrations w/or w/o crosslinking secondary poly-clonal anti-huIgG1 Fcγ-specific goat IgG F(ab)2 fragment in a 1:2 ratio. Activity is characterized by blotting the units of released light (URL) measured during 0.5 s versus the concentration in nM of tested anti-Ox40 construct. URLs are emitted due to luciferase-mediated oxidation of luciferin to oxyluciferin. All clones are able to induce NFκB activation when the OX40 axis is triggered in a human OX40⁺ reporter cell line. All clones are thus agonistic and activate in a dose dependent way. Crosslinking by secondary Fc part specific Abs strongly increases this agonism.

[0102] FIGS. 8A, 8B, 8C, 8D, 8E, and 8F show the bioactivity of the anti-human OX40 antibodies in preactivated human CD4 T cells. Costimulation with plate-immobilized anti-OX40 binders (huIgG1 P329GLALA format) promoted cell proliferation and maturation of sub-optimally restimulated human CD4 T cells and induced an enhanced activated phenotype. PHA-L pre-activated CFSE-labeled human CD4 T cells were cultured for four days on plates pre-coated with mouse IgG Fcγ specific antibodies, human IgG Fcγ specific antibodies (both 2 μg/mL), mouse anti-human CD3 antibodies (clone OKT3, [3 ng/mL]) and titrated anti-Ox40 binders (huIgG1 P329GLALA format). Shown is the event count, the percentage of proliferating (CFSE-low) cells, the percentage of effector T cells (CD127 low/CD45RA low) and the percentage of CD62L low, OX40 positive or Tim-3 positive cells at day 4. Baseline values of samples containing only the plate-immobilized anti-human CD3 were subtracted. Therefore, the enhancing effect of Ox40 stimulation but not the effect of suboptimal anti-CD3 stimulation per se is visible here. All clones are able support suboptimal TCR stimulation in OX40 positive preactived CD4 T cells when they are coated to plate. Cells do survive better and proliferate more. In the tumor micro environment this could lead to increased anti-tumor activity of T cells.

[0103] FIG. 9 summarizes the EC₅₀ values (for all biomarkers) as marker for the agonistic capacity of the respective clone (values calculated from the curves shown in FIGS. 8A-8F). The potency increases from left to right. The event count, the percentage of proliferating (CFSE-low) cells and the percentage of CD62L low, CD45RA low or Tim-3 positive cells at day 4 were plotted vs the anti-Ox40 antibody concentration and EC₅₀ values were calculated using the inbuilt sigmoidal dose response quotation in Prism4 (GraphPad Software, USA).

[0104] FIGS. 10A, 10B, 10C, 10D, 10E, and 10F show the bioactivity of the anti-human OX40 antibodies in preactivated human CD4 T cells in solution. No effect on cell proliferation, maturation or activation status of sub-optimally restimulated human CD4 T cells was detected in the absence of plate immobilization of anti-Ox40 binders (hu IgG1 P329GLALA format). PHA-L pre-activated CFSE-labeled human CD4 T cells were cultured for four days on plates pre-coated with mouse IgG Fcγ specific antibodies and mouse anti-human CD3 antibodies (clone OKT3, [3 ng/mL]). Titrated anti-Ox40 binders (hu IgG1 P329GLALA format) were added to the media and were present in solution throughout the experiment. Shown is the event count, the percentage of proliferating (CFSE-low) cells, the percentage of effector T cells (CD127low CD45RAlow) and the percentage of CD62L low, OX40 positive or Tim-3 positive cells at day 4. Baseline values of samples containing only the plate-immobilized anti-human CD3 were subtracted. Therefore, the enhancing effect of OX40 stimulation but not the effect of suboptimal anti-CD3 stimulation per se is visible here. There is no improved TCR stimulation in the absence of strong crosslinking (P329GLALA format in solution). Crosslinking is therefore essential for a bivalent aOx40 format to be agonistic on T cells. This crosslinking will be provided by FAP expressed on the cell surface of tumor or tumor-stromal cells in targeted formats.

[0105] FIG. 11 shows a correlation between the binding strength and agonistic capacity of the different anti-OX40 clones. Binding of anti-OX40 clones (huIgG1 P329GLALA format) on activated CD4 T cells was performed as described in Example 2.1.2. Plateau values were normalized to the value obtained with clone 8H9 (huIgG1 P329GLALA format). Bioactivity testing of anti-Ox40 clones (huIgG1 P329GLALA format) was performed as described in Example 3.2 and plateau values of PD-1 expression were normalized to the values obtained for clone 8H9 (huIgG1 P329GLALA format). Normalized binding was plotted against normalized bioactivity, to test for a correlation between binding strength and agonistic capacity. For most clones there was a direct correlation (linear regression is shown, p value 0.96; slope 0.91). However, two clones (49B4, 1G4) showed a much stronger bioactivity then could be predicted from their binding strength. This subgroup of clones which show unexpectedly high agonistic potency in the face of low binding ability is of particular interest for the bispecific antigen binding molecules of the invention.

[0106] FIG. 12A shows a schematic scheme of an exemplary bispecific, bivalent antigen binding molecule of the invention (2+2 format).

[0107] FIG. 12B shows a schematic scheme of an exemplary bispecific, monovalent antigen binding molecule (1+1 format) of the invention.

[0108] FIG. 12C shows the setup for the SPR experiments showing simultaneous binding to immobilized human OX40 and human FAP.

[0109] FIGS. 13A, 13B, 13C, and 13D show the SPR diagrams of simultaneous binding of bispecific bivalent 2+2 constructs (analyte 1) to immobilized human OX40 and human FAP (analyte 2). The SPR diagrams are shown for 2+2 constructs with OX40 clones 8H9 (FIG. 13A), 49B4 (FIG. 13B), 1G4 (FIG. 13C) and 20B7 (FIG. 13D).

[0110] FIGS. 13E, 13F, 13G, and 13H show the simultaneous binding of bispecific monovalent 1+1 constructs (analyte 1) to immobilized human Ox40 and human FAP (analyte 2). The SPR diagrams are shown for 1+1 constructs with OX40 clones 8H9 (FIG. 13E), 49B4 (FIG. 13F), 1G4 (FIG. 13G) and 20B7 (FIG. 13H).

[0111] FIGS. 14A, 14B, 14C, 14D, 14E, 14F, 14G, and 14H show the binding of selected anti-OX40 binders (clone 8H9, 1G4) in a FAP targeted monovalent or bivalent format to resting and activated human PBMC. Binding characteristics to OX40 positive T cells (FIGS. 14B and 14D and FIGS. 14E and 14F) were comparable for clones in a conventional bivalent hu IgG format (open square) and a FAP-targeted bivalent format (filled square). Binding of the same clone in a FAP-targeted monovalent format (filled triangle) was clearly weaker due to loss of avidity binding. In the absence of human OX40 expressing cells no binding can be observed (resting cells, FIGS. 14A and 14C, FIGS. 14G and 14H). Shown is the binding as median of fluorescence intensity (MFI) of FITC labeled anti-human IgG Fcγ-specific goat IgG F(ab′)2 fragment which is used as secondary detection antibody. MFI was measured by flow cytometry and baseline corrected by subtracting the MFI of the blank control. The x-axis shows the concentration of antibody constructs. In FIG. 14D it can be seen that clone 1G4 binds to activated, OX40 expressing human CD4⁺ T cells, and to a lower extent to activated human CD8⁺ T cells (FIG. 14B). The bivalent construct binds stronger than the monovalent construct. The constructs do not bind to OX40 negative resting T cells. FIG. 14E shows that clone 8H9 binds to activated, Ox40 expressing human CD4⁺ T cells, and to a lower extent to activated human CD8⁺ T cells (FIG. 14F). The bivalent construct binds stronger than the monovalent construct. The constructs do not bind to Ox40 negative resting T cells.

[0112] FIGS. 15A and 15B show the binding of selected anti-OX40 binders (clone 8H9, 1G4) in a FAP targeted monovalent or bivalent format to FAP positive tumor cells. Transgenic modified mouse embryonic fibroblast NIH/3T3-huFAP clone 39 or WM266-4 cells express high levels of human fibroblast activation protein (huFAP). Only FAP-targeted mono- and bivalent anti-Ox40 constructs (filled square and triangle) but not the same clone in a human IgG1 P329GLALA format (open square) binds to NIH/3T3-huFAP clone 39 cells (FIG. 15A) and WM266-4 cells (FIG. 15B), respectively. Shown is the binding as median of fluorescence intensity (MFI) of Fluorescein isothiocyanate (FITC)-labeled anti-human IgG Fcγ-specific goat IgG F(ab′)2 fragment which is used as secondary detection antibody. MFI was measured by flow cytometry. The x-axis shows the concentration of antibody constructs. The bivalent FAP construct binds stronger than the monovalent construct.

[0113] FIG. 16A shows a schematic scheme of an exemplary bispecific, tetravalent antigen binding molecule of the invention with monvalency for the target cell antigen (4+1 format).

[0114] FIG. 16B shows a schematic scheme of an exemplary bispecific, tetravalent antigen binding molecule with bivalency for the target cell antigen (4+2 format) of the invention.

[0115] FIGS. 17A and 17B show the binding of an anti-OX40 binder (clone 49B4) in different bispecific human IgG1 P329GLALA formats to human FAP positive WM266-4 cells. WM266-4 cells express high levels of human fibroblast activation protein (huFAP). Only FAP-targeted mono- and bivalent bispecific 49B4 constructs (filled circle, square and triangle) but not untargeted 49B4 constructs (open circle, square and triangle) bound to WM266-4 cells. Shown is the binding as median of fluorescence intensity (MFI) of fluorescein isothiocyanate (FITC)-labeled anti-human IgG Fcγ-specific goat IgG F(ab′)2 fragment which is used as secondary detection antibody. MFI was measured by flow cytometry. The x-axis shows the concentration of antibody constructs.

[0116] FIGS. 18A, 18B, 18C, and 18D show the binding of anti-OX40 binder 49B4 in different bispecific human IgG1 P329GLALA formats to resting and activated human CD4 T cells. OX40 is not expressed on resting human CD4 T cells (FIGS. 18A and 18C). In the absence of human OX40 expressing cells no binding was observed. After activation of human PBMCs OX40 is up-regulated on CD4+ T cells (FIGS. 18B and 18D). All constructs containing binder 49B4 bound to Ox40+ activated CD4+ T cells. Tetravalent OX40 binding (circle and square) strongly increased avidity for OX40, whereas the presence of a FAP binding moiety had no impact (compare open vs filled symbols). In comparison, both bivalent constructs (triangle) showed a weaker binding to CD4+ T cells. The binding of clone 49B4 in a bivalent, bispecific construct was clearly stronger than that in the conventional IgG format. Shown is the binding as median of fluorescence intensity (MFI) of FITC labeled anti-human IgG Fcγ-specific goat IgG F(ab′)2 fragment which is used as secondary detection antibody. MFI was measured by flow cytometry and baseline corrected by subtracting the MFI of the blank control. The x-axis shows the concentration of antibody constructs.

[0117] FIGS. 19A, 19B, 19C, and 19D show the binding of anti-OX40 binder 49B4 in different bispecific human IgG1 P329GLALA formast to resting and activated human CD8 T cells. OX40 is not expressed on resting human CD8 T cells (FIGS. 19A and 19C). In the absence of human OX40 expressing cells no binding was observed. After activation of human PBMCs OX40 is up-regulated on CD8⁺ T cells (FIGS. 19B and 19D). OX40 expression on human CD8⁺ T cells is lower than on CD4⁺ T cells and varies between donors and time points. Expression of OX40 was low on the depicted CD8 T cells. All constructs containing binder 49B4 bound to OX40⁺ activated CD8⁺ T cells. Tetravalent OX40 binding (circle and square) strongly increased avidity for OX40, whereas the presence of a FAP binding moiety had no impact (compare open vs filled symbols). In comparison, both bivalent constructs (triangle) showed a weaker binding to CD8⁺ T cells. The binding of clone 49B4 in a bivalent, bispecific construct was clearly stronger than that in the conventional IgG format. Shown is the binding as median of fluorescence intensity (MFI) of FITC labeled anti-human IgG Fcγ-specific goat IgG F(ab′)2 fragment which is used as secondary detection antibody. MFI was measured by flow cytometry and baseline corrected by subtracting the MFI of the blank control. The x-axis shows the concentration of antibody constructs.

[0118] FIGS. 20A, 20B, 20C, and 20D show the binding of anti-Ox40 binder 49B4 in different bispecific human IgG1 P329GLALA formats to activated cynomolgus T cells. The depicted constructs varied in their binding strength (EC₅₀ values) to OX40 positive activated cynomolgus CD4⁺ T cells. Constructs with a tetravalent OX40 binding moiety showed a stronger binding to OX40⁺ T cells than bivalent constructs. The gain in avidity between tetravalent and bivalent binding to OX40 was less strong than observed for human OX40. The expression on activated CD8⁺ T cells was low under this condition and only weak binding was found. Binding of anti-OX40 antibodies to cell surface proteins was detected with a goat anti-human IgG Fc-specific secondary antibody conjugated to FITC using FACS analysis. MFI was measured by flow cytometry and baseline corrected by subtracting the MFI of the blank control. The x-axis shows the concentration of antibody constructs.

[0119] FIG. 21A shows the results of human OX40 competition binding in a cell-based FRET assay.

[0120] FIG. 21B shows the setup for the SPR experiments showing simultaneous binding to immobilized human OX40 and human FAP.

[0121] FIGS. 22A, 22B and 22C shows the SPR diagrams of simultaneous binding of bispecific tetravalent 4+1 constructs (analyte 1) to immobilized human OX40 and human FAP (analyte 2). Constructs 4+1 (49B4/28H1) (FIG. 22A) and 4+1 (49B4/4B9) (FIG. 22B) showed simultaneous binding, whereas construct 4+1 (49B4/DP47) showed only binding to OX40.

[0122] FIG. 22D shows the simultaneous binding of bispecific tetravalent 4+2 construct (49B4/28H1) (analyte 1) to immobilized human Ox40 and human FAP (analyte 2). FIG. 22E shows that construct 4+2 (49B4/DP47) did not show simultaneous binding (FIG. 22E).

[0123] FIGS. 23A, 23B, 23C, and 23D relate to the binding of an anti-OX40 binder (clone 49B4) in different bispecific human IgG1 P329GLALA formats to human FAP human OX40 negative A549 cells. The depicted constructs showed no binding to OX40 negative FAP negative A549 tumor cells. Shown is the binding as median of fluorescence intensity (MFI) of FITC labeled anti-human IgG Fcγ-specific goat IgG F(ab′)₂ fragment which is used as secondary detection antibody. MFI was measured by flow cytometry and baseline corrected by subtracting the MFI of the blank control. The x-axis shows the concentration of antibody constructs. For comparison, the graphs of binding to human FAP positive WM266-4 cells are shown on the right column. WM266-4 cells express high levels of human fibroblast activation protein (huFAP). Shown is the binding as median of fluorescence intensity (MFI) of fluorescein isothiocyanate (FITC)-labeled anti-human IgG Fcγ-specific goat IgG F(ab′)2 fragment which is used as secondary detection antibody. MFI was measured by flow cytometry. The x-axis shows the concentration of antibody constructs.

[0124] FIGS. 24A, 24B, 24C, and 24D show the NFκB activation by an anti-OX40 binder (clone 49B4) in different bispecific human IgG1 P329GLALA formats in HeLa_hOx40_NFkB_Luc1 reporter cells. Shown is the activation of NF-κB signaling pathway in the reporter cell line with anti-OX40 binder 49B9 in different bispecific human IgG1 P329GLALA formats with (FIGS. 24B and 24D) or without (FIGS. 24A and 24D) crosslinking by secondary-antibody. The reporter cells were cultured for 6 hours in the presence of anti-Ox40 constructs at the indicated concentrations with or without crosslinking secondary poly-clonal anti-huIgG1 Fcγ-specific goat IgG F(ab)₂ fragment in a 1:2 ratio. The NF-κB-mediated luciferase activity was characterized by blotting the units of released light (URL), measured during 0.5 s, versus the concentration in nM of tested compounds. URLs are emitted due to luciferase-mediated oxidation of luciferin to oxyluciferin. Tetravalent constructs performed slightly better than bivalent constructs.

[0125] FIGS. 25A, 25B, 25C, 25D, 25E, and 25F show that the activation of NFκB by anti-OX40 binder 49B4 in different bispecific human IgG1 P329GLALA formats in HeLa_hOx40_NFkB_Luc 1 reporter cells in the presence of FAP positive cells. Shown is the activation of NFκB signaling pathway in the reporter cells by with anti-OX40 binder 49B4 in different bispecific human IgG1 P329GLALA formats in the presence of low FAP expressing WM266-4 cells (FIGS. 25A-25C) and intermediate FAP expressing NIH-3T3 human FAP cells (FIG. 25D-25F). The NFκB-mediated luciferase activity was characterized by blotting the units of released light (URL), measured during 0.5 s, versus the concentration in nM of tested compounds. URLs are emitted due to luciferase-mediated oxidation of luciferin to oxyluciferin. Values are baseline corrected by subtracting the URLs of the blank control. For a better comparison of all formats the area under the curve of the respective blotted dose-response curves was quantified as a marker for the agonistic capacity of each construct. The area was calculated using GraphPad Prism. Values are baseline corrected by subtracting the value of the blank control. All constructs were able to induce NFκB activation in Ox40⁺ HeLa reporter cells. Crosslinking by addition of FAP positive cells however increased only the agonistic potential of FAP targeted molecules, but not that of the non-targeted control molecules. Tetravalent constructs performed better than bivalent constructs. Higher FAP expression provided better crosslinking and thus additionally increased OX40 agonism.

[0126] FIGS. 26A, 26B and 26C show the activation of NFKB by anti-OX40 binder 49B4 in different bispecific human IgG1 P329GLALA formats in HeLa_hOx40_NFkB_Luc1 reporter cells in the presence of FAP positive cells. Shown is the activation of NFKB signaling pathway in the reporter cells by with anti-OX40 binder 49B4 in different bispecific human IgG1 P329GLALA formats in the presence of high FAP expressing NIH-3T3 mouse FAP cells (ratio 4 FAP+ tumor cells to 1 reporter cell). The NFKB-mediated luciferase activity was characterized by blotting the units of released light (URL), measured during 0.5 s, versus the concentration in nM of tested compounds. URLs are emitted due to luciferase-mediated oxidation of luciferin to oxyluciferin. Values are baseline corrected by subtracting the URLs of the blank control. For a better comparison of all formats the area under the curve of the respective blotted dose-response curves was quantified as a marker for the agonistic capacity of each construct. The area was calculated using GraphPad Prism. Values are baseline corrected by subtracting the value of the blank control. All constructs were able to induce NFKB activation in Ox40⁺ HeLa reporter cells. Crosslinking by addition of FAP positive cells however increased only the agonistic potential of FAP targeted molecules, but not that of the non-targeted control molecules. Tetravalent constructs performed better than bivalent constructs. Higher FAP expression provided better crosslinking and thus additionally increased OX40 agonism.

[0127] FIGS. 27A, 27B, 27C, 27D, 27E, 27F, 27G, and 27H show the rescue of suboptimal TCR restimulation of preactivated CD4 T cells with plate-immobilized FAP targeted mono and bivalent anti-OX40 (49B4) constructs. Costimulation with plate-immobilized anti-Ox40 constructs promoted cell proliferation and maturation of sub-optimally restimulated human CD4 T cells and induced an enhanced activated phenotype. PHA-L pre-activated CFSE-labeled human CD4 T cells were cultured for four days on plates pre-coated with mouse IgG Fcγ spec. antibodies, human IgG Fcγ spec. antibodies (both 2 μg/mL), mouse anti-human CD3 antibodies (clone OKT3, [3 ng/mL]) and titrated anti-OX40 constructs. Shown is the event count, the percentage of proliferating (CFSE-low) cells, the percentage of effector T cells (CD127low CD45RAlow) and the percentage of CD62L low, OX40 positive or Tim-3 positive cells at day 4. Baseline values of samples containing only the plate-immobilized anti-human CD3 were subtracted. Therefore, the enhancing effect of OX40 stimulation but not the effect of suboptimal anti-CD3 stimulation per se is visible here. In FIG. 27A to 27H it can be seen that all OX40 constructs were able to rescue suboptimal TCR stimulation of preactivated, Ox40⁺ CD4 T cells when coated to plate. Cells survived and proliferation was better. All tetravalent constructs performed comparable to each other and better than bivalent constructs when coated to plate.

[0128] FIGS. 28A, 28B, 28C, and 28D show that anti-OX40 constructs in solution did not change suboptimal TCR restimulation of preactivated CD4 T cells. No effect on cell proliferation and maturation of sub-optimally restimulated human CD4 T cells was detected in the absence of plate immobilization of anti-OX40 constructs (huIgG1 P329GLALA formats). PHA-L pre-activated CFSE-labeled human CD4 T cells were cultured for four days on plates pre-coated with mouse IgG Fcγ spec. antibodies and mouse anti-human CD3 antibodies (clone OKT3, [3 ng/mL]). Titrated anti-OX40 constructs (huIgG1 P329GLALA format) were added to the media and were present in solution throughout the experiment. Shown is the event count and the percentage of effector T cells (CD127_{low}CD45RA_{low}) cells at day 4. Baseline values of samples containing only the plate-immobilized anti-human CD3 were subtracted. Therefore, the enhancing effect of OX40 stimulation but not the effect of suboptimal anti-CD3 stimulation per se is visible here.

[0129] FIGS. 29A, 29B, 29C, and 29D relate to the OX40 mediated costimulation of suboptimally TCR triggered resting human PBMC and hypercrosslinking by cell surface FAP. Costimulation with non-targeted tetravalent anti-Ox40 (49B4) huIgG1 P329GLALA 4+1 and 4+2 did hardly rescue suboptimally TCR stimulated CD4 and CD8 T cells. Hyper-crosslinking of the FAP targeted bi- and tetravalent anti-Ox40 constructs by the present NIH/3T3-huFAP clone 39 cells strongly promoted survival and proliferation in human CD4 and CD8 T cells. Shown is the event count of vital CD4⁺ (FIGS. 29A and 29B) and CD8⁺ (FIGS. 29C and 29D) T cells. Baseline values of samples containing only the anti-human CD3 (clone V9, huIgG1), resting human PBMC and NIH/3T3-huFAP clone 39 were subtracted. Thus the enhancing effect of OX40 co-stimulation but not the effect of suboptimal anti-CD3 stimulation per se is shown here. Targeted tetravalent constructs were superior to bivalent constructs. In a FAP positive tumor micro environment this could lead to increased anti-tumor activity of T cells in the absence of systemic OX40 activation.

[0130] FIGS. 30A, 30B, 30C, and 30D relate to the rescue of suboptimal TCR stimulation of resting human PBMC with cell surface immobilized FAP targeted tetravalent anti-Ox40 (49B4) constructs in the proliferation stage. Costimulation with non-targeted tetravalent anti-Ox40 (49B4) huIgG1 P329GLALA 4+1 and 4+2 did hardly rescue suboptimally TCR stimulated CD4 and CD8 T cells. Hyper-crosslinking of the FAP targeted bi- and tetravalent anti-Ox40 constructs by the present NIH/3T3-huFAP clone 39 cells strongly promoted survival and proliferation in human CD4 and CD8 T cells. Shown is percentage of CFSE low vital CD4⁺ (FIGS. 30A and 30B) and CD8⁺ (FIGS. 30C and 30D) T cells. Baseline values of samples containing only the anti-human CD3 (clone V9, huIgG1), resting human PBMC and NIH/3T3-huFAP clone 39 were subtracted. Thus the enhancing effect of OX40 co-stimulation but not the effect of suboptimal anti-CD3 stimulation per se is shown here. The targeted tetravalent constructs were superior to the bivalent constructs.

[0131] FIGS. 31A, 31B, 31C, and 31D show the rescue of suboptimal TCR stimulation of resting human PBMC with cell surface immobilized FAP targeted tetravalent anti-Ox40 (49B4) constructs by enhancing activated phenotype CD25. Costimulation with non-targeted tetravalent anti-Ox40 (49B4) huIgG1 P329GLALA 4+1 and 4+2 did hardly rescue suboptimally TCR stimulated CD4 and CD8 T cells. Hyper-crosslinking of the FAP targeted bi- and tetravalent anti-Ox40 constructs by the present NIH/3T3-huFAP clone 39 cells strongly enhanced an activated phenotype in human CD4 and CD8 T cells. Shown is percentage of CD25 positive, vital CD4⁺ (FIGS. 31A and 31B) and CD8⁺ (FIGS. 31C and 31D) T cells. Baseline values of samples containing only the anti-human CD3 (clone V9, huIgG1), resting human PBMC and NIH/3T3-huFAP clone 39 were subtracted. Thus the enhancing effect of OX40 co-stimulation but not the effect of suboptimal anti-CD3 stimulation per se is shown here. Targeted tetravalent constructs performed better than bivalent constructs.

[0132] FIGS. 32A, 32B, and 32C provide a summary of hyper-crosslinking experiments. Hyper-crosslinking of the FAP targeted bi- and tetravalent anti-OX40 constructs by the present NIH/3T3-huFAP clone 39 cells strongly enhanced an activated phenotype in human CD4 and CD8 T cells and sustained survival and proliferation. For a better comparison of all formats the area under the curve of the respective blotted dose-response curves of FIGS. 29A to 29D, FIGS. 30A to 30D and FIGS. 31A to 31D was quantified as a marker for the agonistic capacity of each construct. The area was calculated using GraphPad Prism. Values are baseline corrected by subtracting the value of the blank control. Only constructs containing FAP binding moiety were able to rescue suboptimal TCR stimulation of resting CD4 and CD8 T cells when crosslinking was provided by FAP positive cells (NIH). Cells showed a stronger proliferation, expansion and activation (CD25). Targeted tetravalent constructs were superior to bivalent constructs. In a FAP positive tumor micro environment this could lead to increased anti-tumor activity of T cells in the absence of systemic OX40 activation.

[0133] FIG. 33 shows a comparison of EC₅₀ values. For a better comparison of all formats the EC₅₀ values of the respective blotted dose-response curves of FIGS. 29A to 29D, FIGS. 30A to 30D and FIGS. 31A to 31D was quantified as a marker for the agonistic capacity of each construct. The EC₅₀ value was calculated using GraphPad Prism. It can be easily seen that the targeted 4+1 and 4+2 constructs performed better than 2+2 construct.

[0134] FIGS. 34A, 34B, 34C, and 34D show the binding to resting and activated human T cells of four anti-human 4-1BB-specific clones transferred to a huIgG1 P329G LALA format (filled diamond: clone 25G7, filled square: clone 12B3, filled star: clone 11D5, pointing-up triangle: clone 9B11) and one anti-mouse 4-1BB specific clone 20G2 transferred to a huIgG1 P329G LALA format (pointing down triangle). As negative control a non-4-1BB-specific clone DP47 huIgG1 P329G LALA antibody was used (open grey circle). The upper panels show binding to resting CD4⁺ T cells (FIG. 34A) and activated CD4⁺ T cells (FIG. 34B), whereas the lower panels show binding to resting CD8⁺ T cells (FIG. 34C) and activated CD8⁺ T cells (FIG. 34D). The binding is characterized by plotting the median of fluorescence (MFI) of FITC-labeled or PE-labeled anti-human IgG Fcγ-specific goat IgG F(ab′)₂ fragment that is used as secondary detection antibody versus the concentration in nM of the tested primary anti-4-1BB-binding huIgG1 P329G LALA antibodies. MFI was measured by flow cytometry and baseline corrected by subtracting the MFI of the blank control (no primary antibody).

[0135] FIGS. 35A, 35B, 35C, and 35D show the binding to 4-1BB expressing mouse T cells. Shown is the binding to resting and activated mouse T cells of four anti-human 4-1BB binding huIgG1 P329G LALA antibody clones (filled diamond: clone 25G7, filled square: clone 12B3, filled star: clone 11D5, pointing-up triangle: clone 9B11) and one anti-mouse 4-1BB binding huIgG1 P329G LALA antibody clone 20G2 (pointing-down tringle). As negative control a non-4-1BB binding DP47 huIgG1 P329G LALA antibody was used (open grey circle). The upper panels show binding to resting mouse CD4⁺ T cells (FIG. 35A) and activated CD4⁺ T cells (FIG. 35B), whereas the lower panels show binding to resting mouse CD8⁺ T cells (FIG. 35C) and activated CD8⁺ T cells (FIG. 35D). The binding is characterized by plotting the MFI of FITC-labeled anti-human IgG Fcγ-specific goat IgG F(ab′)₂ fragment that is used as secondary detection antibody versus the concentration in nM of the tested primary anti-4-1BB-binding huIgG1 P329G LALA antibodies. MFI was measured by flow cytometry and baseline corrected by subtracting the MFI of the blank control (no primary antibody).

[0136] FIGS. 36A, 36B, 36C, and 36D show the binding of mouse IgGs to 4-1BB expressing mouse T cells. Shown is the binding to resting and activated mouse T cells of the anti-mouse 4-1BB binding clone 20G2 transferred to the formats mouse IgG1 DAPG and mouse IgG1 wildtype (wt). As negative control a commercial non-4-1BB binding mouse IgG1 wt isotype control was used (open grey circle, BioLegend, Cat.-No. 400153). In the upper panels binding to resting CD4⁺ T cells (FIG. 36A) and activated CD4⁺ T cells (FIG. 36B) is shown, whereas in the lower panels binding to resting CD8⁺ T cells (FIG. 36C) and activated CD8⁺ T cells (FIG. 36D) is shown. The binding is characterized by plotting the median of fluorescence of intensity (MFI) of FITC-labeled anti-mouse IgG Fcγ-specific goat IgG F(ab′)2 fragment that is used as secondary detection antibody versus the concentration in nM of the tested primary anti-4-1BB-binding molgG antibodies. MFI was measured by flow cytometry and baseline corrected by subtracting the MFI of the blank control (no primary antibody).

[0137] FIGS. 37A and 37B show the binding to 4-1BB expressing cynomolgus T cells. Shown is the binding to activated cynomolgus T cells of four anti-human 4-1BB binding huIgG1 P329G LALA antibody clones (filled diamond: clone 25G7, filled square: clone 12B3, filled star: clone 11D5, pointing-up triangle: clone 9B11). As negative control a non-4-1BB binding DP47 huIgG1 P329G LALA antibody was used (open grey circle). Shown is the binding to activated CD4⁺ T cells (FIG. 37A) and to activated CD8⁺ T cells (FIG. 37B), respectively. The binding is characterized by plotting the median of fluorescence of intensity (MFI) of FITC-labeled anti-human IgG Fcγ-specific goat IgG F(ab′)2 fragment that is used as secondary detection antibody versus the concentration in nM of the tested primary anti-4-1BB-binding huIgG1 P329G LALA antibodies. MFI was measured by flow cytometry and baseline corrected by subtracting the MFI of the blank control (no primary antibody).

[0138] FIGS. 38A, 38B, 38C, 38D, and 35E refer to ligand binding properties of the anti-4-1BB antibodies of the invention as determined by surface plasmon resonance. The interaction between human anti-4-1BB IgG 25G7 (FIG. 38A), 11D5 (FIG. 38B), 9B11 (FIG. 38C) and 12B3 (FIG. 38D) and the preformed complex hu4-1BB Ligand/hu4-1BB is shown as well as the interaction of mouse anti-4-1BB clone 20G2 (FIG. 38E) and the preformed complex mu4-1BB Ligand/mu4-1BB.

[0139] FIGS. 39A, 39B, 39C, and 39D show functional properties of different anti-human 4-1BB clones in vitro. Pre-activated human CD8⁺ T cells were activated with different concentrations of surface immobilized anti-human-4-1BB-specific huIgG1 P329G LALA antibodies in the absence of anti-human CD3 antibody (FIGS. 39A and 39C) or in the presence of sub-optimal concentration of surface immobilized anti-human CD3 antibody (FIGS. 39B and 39D). Shown is the frequency of IFNγ⁺ (A and B) and TNFα⁺ (C and D) CD8⁺ T cells in the total CD8⁺ T cell population versus the concentration of surface immobilized 4-1BB-binding huIgG1 P329G LALA in pM. In the presence of CD3-stimulation 4-1BB-co-stimulation increased IFNγ (FIG. 39B) and TNFα (FIG. 39D) secretion in a concentration dependent manner. In the absence of CD3-stimulation, activation of 4-1BB had no effect on IFNγ (FIG. 39A) and TNFα (FIG. 39C) secretion.

[0140] FIG. 40A shows a schematic scheme of an exemplary bispecific, bivalent antigen binding molecule of the invention (2+2 format) comprising two anti-4-1BB Fab fragments and two anti-FAP Fab fragments.

[0141] FIG. 40B shows a schematic scheme of an exemplary bispecific, monovalent antigen binding molecule (1+1 format) of the invention comprising one anti-4-1BB Fab fragment and one anti-FAP Fab fragment.

[0142] FIG. 40C shows a schematic scheme of an exemplary bispecific, bivalent antigen binding molecule (2+1 format) of the invention comprising two anti-4-1BB Fab fragment and a VH and VL domain capable of specific binding to FAP. The filled circle symbolizes the knob into hole mutation. In the construct shown in FIG. 40C the VH domain of the FAP antibody is fused to the C-terminus of the Fc knob heavy chain.

[0143] FIG. 40D shows a construct in which the VH domain of the FAP antibody is bound to the C-terminus of the Fc hole chain.

[0144] FIGS. 40E and 40F show a schematic scheme of an exemplary bispecific, tetravalent antigen binding molecule of the invention with monovalency for FAP (4+1 format).

[0145] FIGS. 41A, 41B, 41C, and 41D illustrate the simultaneous binding of bispecific anti-4-1BB×anti-FAP antigen binding molecules (4+1 constructs). In FIG. 41A the setup of the assay is shown. In FIGS. 41B to 41D simultaneous binding of bispecific constructs (analyte 1) to immobilized human 4-1BB and human FAP (analyte 2) is shown. FIG. 41B shows the binding of the bispecific 4+1 construct with clone 12B3, FIG. 41C for the construct with clone 25G7 and FIG. 41D for the construct with clone 11D5.

[0146] FIG. 42 shows a FRET based competition assay to assess the binding of bivalent (IgG) and tetravalent (4+1) 4-1BB×FAP constructs to membrane bound 4-1BB. For anti-4-1BB binder 12B3 the tetravalent 4+1 format competes better for binding than the respective bivalent IgG antibody.

[0147] FIGS. 43A, 43B, 43C, and 43D show the binding to resting and activated human T cells. The concentration of 4-1BB-binding molecules is blotted against the geo mean of fluorescence intensity (MFI) of the PE-conjugated secondary detection antibody. All values are baseline corrected by subtracting the baseline value of the blank control (e.g. no primary only secondary detection antibody). In FIG. 43A the binding to resting CD4 T cells and in FIG. 43B to activated CD4⁺ T cells is shown. In FIG. 43C the binding to resting CD8 T cells andin FIG. 43D to activated CD8⁺ T cells is shown. Only 4-1BB-binding-domain-containing constructs like 12B3 huIgG1 P329G LALA (black filled square), 12B3×FAP (28H1) 2+2 antigen binding molecule (black filled triangle), 12B3×FAP (28H1) 1+1 antigen binding molecule (half filled grey circle) or 12B3×FAP (4B9) 4+1 antigen binding molecule (grey half-filled square) bind efficiently to 4-1BB-expressing cells. No binding could be detected with the germline control molecule DP47 huIgG1 P329G LALA (open black circles, dotted line).

[0148] FIG. 44 summarizes the binding to activated human CD8⁺ T cells. Shown is the area under the curve (AUC) of binding curves to high-4-1BB-expressing activated CD8⁺ T cells against the different 4-1BB-specific molecules. The formats and the respective FAP-specific clones (28H1 or 4B9) are indicated below the graph as pictograms. The 4-1BB-binding clone 12B3 is indicated by grey columns whereas the isotype control DP47 huIgG1 P329G LALA is indicated as white column (only IgG, left column).

[0149] FIGS. 45A and 45B relate to the binding to human FAP-expressing cells. The concentration of 4-1BB-binding molecules is blotted against the geo mean of fluorescence intensity (MFI) of the PE-conjugated secondary detection antibody. All values are baseline corrected by subtracting the baseline values of the blank control (e.g. no primary only secondary detection antibody). In FIG. 45A binding to intermediate-FAP-expressing human melanoma cell line WM-266-4 and in FIG. 45B binding to high-FAP-expressing NIH/3T3-huFAP clone 19 cells are shown. Only FAP-binding-domain-containing constructs like 12B3×FAP (28H1) 2+2 antigen binding molecule (black filled triangle), 12B3×FAP (28H1) 1+1 antigen binding molecule (half filled grey circle) or 12B3×FAP (4B9) 4+1 antigen binding molecule (grey half-filled square) bind efficiently to FAP-expressing cells. No binding could be detected with non FAP-targeted molecules 12B3 huIgG1 P329G LALA (black filled square) and the control molecule DP47 huIgG1 P329G LALA (open black circles, dotted line).

[0150] FIG. 46 summarizes the binding to human FAP-expressing NIH/3T3-huFAP cells. Shown is the area under the curve (AUC) of the binding curves to FAP-high-expressing NIH/3T3-huFAP cells blotted against the different 4-1BB-specific molecules. The formats and the respective FAP-specific clone (28H1 or 4B9) are indicated below the graph as pictograms. The 4-1BB-binding clones are indicated by the column color, whereby the isotype control DP47 is indicated in white and molecules containing the 4-1BB-specific clone 12B3 are indicated in grey.

[0151] FIGS. 47A, 47B, 47C, 47D, 47E, 47F, 47G, 47H, and 47I relate to NFκB-controlled luciferase expression in 4-1BB expressing reporter cell line (Example 10). The concentration of 4-1BB-binding molecules is blotted against the units of released light (URL) measured after 6 h of incubation. All values are baseline corrected by subtracting the baseline values of the blank control (e.g. no antibodies added). In FIGS. 47A, D and G FAP-target-independent 4-1BB activation is shown, whereby 4-1BB-binding induces NFκB-controlled luciferase expression in the reporter cell line without any FAP-mediated crosslinking. No construct is able to induce FAP-targeted-independent activation. In FIGS. 47B, 47E and 47H FAP-intermediate expressing human melanoma cell line WM-266-4 and in FIGS. 47C, 47F and 47I high-FAP-expressing cell line NIH/3T3-huFAP clone 19 was added in a ratio 5:1 to the reporter cell line. The FAP-expressing cells lead to a crosslinking of FAP-targeted 4-1BB-binding molecules and increase their potential to induce NFkB/luficerase activation in the 4-1BB-expressing reporter cell line. The tetravalent 4-1BB FAP-targeted 4+1 molecules show the strongest activation as soon as FAP-expressing cells are present. This is true for clone 12B3 (half-filled grey square, half-dotted line, FIGS. 47B and C), clone 11D5 (grey star, dotted line, FIGS. 47E and F) and clone 25G7 (half-filled triangle, dotted line, FIGS. 47H and I).

[0152] FIGS. 48A and 48B summarize the NFκB-mediated luciferase activity in the 4-1BB-expressing reporter cell line in the presence of NIH/3T3-huFAP cells. Shown is the area under the curve (AUC) of the activation curves in the presence of NIH/3T3-huFAP cells (shown in FIGS. 47C, F and I). Used antibody formats and anti-FAP clones (28H1 or 4B9) are indicated as pictograms under the graph, the different agonistic 4-1BB clones are indicated with different column colors. The Isotype control DP47 is indicated in white (baseline), the 4-1BB-specific clone 12B3 is indicated in grey, the 4-1BB-specific clone 25G7 in black and the 4-1BB-specific clone 11D5 in back-white-check. The graph shows that only FAP-targeted molecules can induce a strong activation above background and that the FAP (4B9)-targeted 4+1 constructs are superior to all other tested molecules.

[0153] FIGS. 49A, 49B, 49C, and 49D relate to the measurement of cross-specificity for anti-GITR antibody 8A06 as described in Example 11.4.1.1. FIG. 49A is a schematic scheme of the assay set up for the determination of species cross-reactivity. FIG. 49B shows the specificity of antibody 8A06 for human GITR. The specificity for cynomolgus GITR is shown in FIG. 49C and FIG. 49D shows that 8A06 does not bind to murine GITR.

[0154] FIGS. 50A, 50B, and 50C show the assay set up for determination of affinity of GITR specific antibody 8A06 to human and cynomolgus GITR and the corresponding affinity results. FIG. 50B shows the results for human GITR, whereas the results for cynomolgus GITR are shown in FIG. 50C.

[0155] FIGS. 51A, 51B, and 51C show the ligand blocking property of the anti-GITR clone 8A06 determined by surface plasmon resonance. The setup of the experiment (see Example 11.4.1.2) is shown in FIG. 51A and the observed interaction between anti-GITR IgG 8A06 and the preformed complex huGITR/huGITR ligand can be seen in FIG. 51B. FIG. 51C shows the interaction between anti.GITR IgG 6C8 and the preformed complex huGITR/huGITR ligand.

[0156] FIGS. 52A, 52B, and 52C relate to the epitope binning described in Example 11.4.1.3. Measured was the binding of anti-GITR antibodies to preformed antibody complexed with GITR. In FIG. 52A the setup of the assay is shown, the interaction between anti-GITR 8A06 IgG and the preformed complex of clone 6C8/huGITR is shown in FIG. 52B and the interaction between anti-GITR 6C8 IgG and the preformed complex of clone 8A06/huGITR is presented in FIG. 52C.

[0157] FIG. 53A is a schematic scheme of an exemplary bispecific, tetravalent anti-GITR antigen binding molecule of the invention with monovalency for FAP (4+1 format). The black point symbolizes the knob-into-hole modifications to allow better pairing of the two different heavy chains.

[0158] FIG. 53B is a schematic scheme of an exemplary bispecific, tetravalent antigen binding molecule with bivalency for FAP (4+2 format) of the invention. The constant regions of the anti-GITR Fab fragments may contain modifications (charged residues) in order to allow better pairing with the light chains.

[0159] FIGS. 54A, 54B, and 54C show the simultaneous binding of bispecific 4+1 and 4+2 anti-GITR×anti-FAP constructs. The setup of the experiment is shown in FIG. 54A. Simultaneous binding of the bispecific 4+1 construct containing anti-GITR clone 8A06 (analyte 1) to immobilized human GITR and human FAP (analyte 2) is shown in FIG. 54B. Simultaneous binding of the bispecific 4+2 construct containing anti-GITR clone 8A06 (analyte 1) to immobilized human GITR and human FAP (analyte 2) is illustrated in FIG. 54C.

[0160] FIGS. 55A and 55B relate to the binding to GITR-expressing HEK cells. As shown in FIG. 55A, all tested bispecific anti-GITR constructs bound efficiently to human GITR expressing HEK cells, but not, or at negligible rates, to GITR negative control HEK cells (FIG. 55B). The GITR specificity of the anti-GITR clone is thus maintained also in the tetravalent, bispecific, FAP targeted format. All constructs are made with anti-GITR clone 8A06 and anti-FAP clone 28H1 or, in a untargeted version, with germline control DP47GS. 4+2 means a tetravalent bispecific antigen binding molecule with 4 anti-GITR moieties and 2 anti-FAP moieties as disclosed herein, whereas 4+2 CR refers to the molecule with additional charged residues as described herein.

[0161] FIGS. 56A and 56B relate to the binding to FAP-expressing 3T3 cells. As shown in FIG. 56A, tested bispecific anti-GITR×anti-FAP constructs were able to bind to human FAP expressing 3T3 cells, but not, or at negligible rates, to FAP-negative control 3T3 cells (FIG. 56B). The FAP specificity of the anti-FAP clone is thus maintained also in the tetravalent, bispecific format with a monovalent or bivalent FAP targeting moiety at the C-terminus.

[0162] FIGS. 57A and 57B show the GITR-mediated costimulation of suboptimal stimulated TCR. Costimulation with non-targeted tetravalent anti-GITR antigen binding molecule (GITR 8A06 DP47GS 4+1 sf w(1a)) (triangle) did not have an effect on the proliferative capacity of suboptimally TCR stimulated CD4 (FIG. 57A) and CD8 T cells (FIG. 57B), whereas hyper-crosslinking of the FAP-targeted anti-GITR construct (GITR 8A06 28H1 4+1 sf W(1)) (circle) by the present NIH/3T3-huFAP cells is needed for T cell costimulation and promoted proliferation.

### DETAILED DESCRIPTION OF THE INVENTION

### Definitions

[0163] Unless defined otherwise, technical and scientific terms used herein have the same meaning as generally used in the art to which this invention belongs. For purposes of interpreting this specification, the following definitions will apply and whenever appropriate, terms used in the singular will also include the plural and vice versa.

[0164] As used herein, the term “antigen binding molecule” refers in its broadest sense to a molecule that specifically binds an antigenic determinant. Examples of antigen binding molecules are antibodies, antibody fragments and scaffold antigen binding proteins.

[0165] As used herein, the term “moiety capable of specific binding to a target cell antigen” refers to a polypeptide molecule that specifically binds to an antigenic determinant. In one aspect, the antigen binding moiety is able to activate signaling through its target cell antigen. In a particular aspect, the antigen binding moiety is able to direct the entity to which it is attached (e.g. the TNF family ligand trimer) to a target site, for example to a specific type of tumor cell or tumor stroma bearing the antigenic determinant. Moieties capable of specific binding to a target cell antigen include antibodies and fragments thereof as further defined herein. In addition, moieties capable of specific binding to a target cell antigen include scaffold antigen binding proteins as further defined herein, e.g. binding domains which are based on designed repeat proteins or designed repeat domains (see e.g. WO 2002/020565).

[0166] In relation to an antibody or fragment thereof, the term “moiety capable of specific binding to a target cell antigen” refers to the part of the molecule that comprises the area which specifically binds to and is complementary to part or all of an antigen. A moiety capable of specific antigen binding may be provided, for example, by one or more antibody variable domains (also called antibody variable regions). Particularly, a moiety capable of specific antigen binding comprises an antibody light chain variable region (VL) and an antibody heavy chain variable region (VH). In one aspect, the “moiety capable of specific binding to a target cell antigen” is a Fab fragment or a cross-Fab fragment.

[0167] The term “moiety capable of specific binding to a costimulatory TNF receptor family member” refers to a polypeptide molecule that specifically binds to a costimulatory TNF receptor superfamily member. In one aspect, the antigen binding moiety is able to activate signaling through a costimulatory TNF receptor family member. Moieties capable of specific binding to a target cell antigen include antibodies and fragments thereof as further defined herein. In addition, moieties capable of specific binding to a costimulatory TNF receptor family member include scaffold antigen binding proteins as further defined herein, e.g. binding domains which are based on designed repeat proteins or designed repeat domains (see e.g. WO 2002/020565). Particularly, a moiety capable of specific binding to a costimulatory TNF receptor family member comprises an antibody light chain variable region (VL) and an antibody heavy chain variable region (VH). In a particular aspect, the “moiety capable of specific binding to a costimulatory TNF receptor family member” is an antibody fragment. In one aspect, the “moiety capable of specific binding to a costimulatory TNF receptor family member” is selected from the group consisting of single-chain antibody molecules (e.g. scFv), dual variable domains (DVD) and single domain antibodies, Fab fragments and cross-Fab fragments. More particularly, the “moiety capable of specific binding to a costimulatory TNF receptor family member” is a Fab fragment or a cross-Fab fragment.

[0168] The term “antibody” herein is used in the broadest sense and encompasses various antibody structures, including but not limited to monoclonal antibodies, polyclonal antibodies, monospecific and multispecific antibodies (e.g., bispecific antibodies), and antibody fragments so long as they exhibit the desired antigen-binding activity.

[0169] The term “monoclonal antibody” as used herein refers to an antibody obtained from a population of substantially homogeneous antibodies, i.e., the individual antibodies comprising the population are identical and/or bind the same epitope, except for possible variant antibodies, e.g. containing naturally occurring mutations or arising during production of a monoclonal antibody preparation, such variants generally being present in minor amounts. In contrast to polyclonal antibody preparations, which typically include different antibodies directed against different determinants (epitopes), each monoclonal antibody of a monoclonal antibody preparation is directed against a single determinant on an antigen.

[0170] The term “monospecific” antibody as used herein denotes an antibody that has one or more binding sites each of which bind to the same epitope of the same antigen. The term “bispecific” means that the antigen binding molecule is able to specifically bind to at least two distinct antigenic determinants. Typically, a bispecific antigen binding molecule comprises two antigen binding sites, each of which is specific for a different antigenic determinant. In certain embodiments the bispecific antigen binding molecule is capable of simultaneously binding two antigenic determinants, particularly two antigenic determinants expressed on two distinct cells.

[0171] The term “valent” as used within the current application denotes the presence of a specified number of binding sites specific for one distinct antigenic determinant in an antigen binding molecule that are specific for one distinct antigenic determinant. As such, the terms “bivalent”, “tetravalent”, and “hexavalent” denote the presence of two binding sites, four binding sites, and six binding sites specific for a certain antigenic determinant, respectively, in an antigen binding molecule. In particular aspects of the invention, the bispecific antigen binding molecules according to the invention can be monovalent for a certain antigenic determinant, meaning that they have only one binding site for said antigenic determinant or they can be bivalent for a certain antigenic determinant, meaning that they have two binding sites for said antigenic determinant. Particular molecules of the invention are tetravalent for a costimulatory TNF receptor, meaning that they have four binding sites for a costimulatory TNF receptor.

[0172] The terms “full length antibody”, “intact antibody”, and “whole antibody” are used herein interchangeably to refer to an antibody having a structure substantially similar to a native antibody structure. “Native antibodies” refer to naturally occurring immunoglobulin molecules with varying structures. For example, native IgG-class antibodies are heterotetrameric glycoproteins of about 150,000 daltons, composed of two light chains and two heavy chains that are disulfide-bonded. From N- to C-terminus, each heavy chain has a variable region (VH), also called a variable heavy domain or a heavy chain variable domain, followed by three constant domains (CH1, CH2, and CH3), also called a heavy chain constant region. Similarly, from N- to C-terminus, each light chain has a variable region (VL), also called a variable light domain or a light chain variable domain, followed by a light chain constant domain (CL), also called a light chain constant region. The heavy chain of an antibody may be assigned to one of five types, called α (IgA), δ (IgD), ε (IgE), γ (IgG), or μ (IgM), some of which may be further divided into subtypes, e.g. γ1 (IgG1), γ2 (IgG2), γ3 (IgG3), γ4 (IgG4), α1 (IgA1) and α2 (IgA2). The light chain of an antibody may be assigned to one of two types, called kappa (κ) and lambda (λ), based on the amino acid sequence of its constant domain.

[0173] An “antibody fragment” refers to a molecule other than an intact antibody that comprises a portion of an intact antibody that binds the antigen to which the intact antibody binds. Examples of antibody fragments include but are not limited to Fv, Fab, Fab′, Fab′-SH, F(ab′)₂; diabodies, triabodies, tetrabodies, cross-Fab fragments; linear antibodies; single-chain antibody molecules (e.g. scFv), dual variable domain (DVD) and single domain antibodies. For a review of certain antibody fragments, see Hudson et al., Nat Med 9, 129-134 (2003). For a review of scFv fragments, see e.g. Plückthun, in The Pharmacology of Monoclonal Antibodies, vol. 113, Rosenburg and Moore eds., Springer-Verlag, New York, pp. 269-315 (1994); see also WO 93/16185; and U.S. Pat. Nos. 5,571,894 and 5,587,458. For discussion of Fab and F(ab′)2 fragments comprising salvage receptor binding epitope residues and having increased in vivo half-life, see U.S. Pat. No. 5,869,046. Diabodies are antibody fragments with two antigen-binding sites that may be bivalent or bispecific, see, for example, EP 404,097; WO 1993/01161; Hudson et al., Nat Med 9, 129-134 (2003); and Hollinger et al., Proc Natl Acad Sci USA 90, 6444-6448 (1993). Triabodies and tetrabodies are also described in Hudson et al., Nat Med 9, 129-134 (2003). Single-domain antibodies are antibody fragments comprising all or a portion of the heavy chain variable domain or all or a portion of the light chain variable domain of an antibody. In certain embodiments, a single-domain antibody is a human single-domain antibody (Domantis, Inc., Waltham, Mass.; see e.g. U.S. Pat. No. 6,248,516 B1). Antibody fragments can be made by various techniques, including but not limited to proteolytic digestion of an intact antibody as well as production by recombinant host cells (e.g. E. coli or phage), as described herein.

[0174] Papain digestion of intact antibodies produces two identical antigen-binding fragments, called “Fab” fragments containing each the heavy- and light-chain variable domains and also the constant domain of the light chain and the first constant domain (CH1) of the heavy chain. As used herein, Thus, the term “Fab fragment” refers to an antibody fragment comprising a light chain fragment comprising a VL domain and a constant domain of a light chain (CL), and a VH domain and a first constant domain (CH1) of a heavy chain. Fab′ fragments differ from Fab fragments by the addition of a few residues at the carboxy terminus of the heavy chain CH1 domain including one or more cysteins from the antibody hinge region. Fab′-SH are Fab′ fragments wherein the cysteine residue(s) of the constant domains bear a free thiol group. Pepsin treatment yields an F(ab)₂ fragment that has two antigen-combining sites (two Fab fragments) and a part of the Fc region. According to the present invention, the term “Fab fragment” also includes “cross-Fab fragments” or “crossover Fab fragments” as defined below.

[0175] The term “cross-Fab fragment” or “xFab fragment” or “crossover Fab fragment” refers to a Fab fragment, wherein either the variable regions or the constant regions of the heavy and light chain are exchanged. Two different chain compositions of a crossover Fab molecule are possible and comprised in the bispecific antibodies of the invention: On the one hand, the variable regions of the Fab heavy and light chain are exchanged, i.e. the crossover Fab molecule comprises a peptide chain composed of the light chain variable region (VL) and the heavy chain constant region (CH1), and a peptide chain composed of the heavy chain variable region (VH) and the light chain constant region (CL). This crossover Fab molecule is also referred to as CrossFab_{(VLVH)}. On the other hand, when the constant regions of the Fab heavy and light chain are exchanged, the crossover Fab molecule comprises a peptide chain composed of the heavy chain variable region (VH) and the light chain constant region (CL), and a peptide chain composed of the light chain variable region (VL) and the heavy chain constant region (CH1). This crossover Fab molecule is also referred to as CrossFab_{(CLCH1)}.

[0176] A “single chain Fab fragment” or “scFab” is a polypeptide consisting of an antibody heavy chain variable domain (VH), an antibody constant domain 1 (CH1), an antibody light chain variable domain (VL), an antibody light chain constant domain (CL) and a linker, wherein said antibody domains and said linker have one of the following orders in N-terminal to C-terminal direction: a) VH-CH1-linker-VL-CL, b) VL-CL-linker-VH-CH1, c) VH-CL-linker-VL-CH1 or d) VL-CH1-linker-VH-CL; and wherein said linker is a polypeptide of at least 30 amino acids, preferably between 32 and 50 amino acids. Said single chain Fab fragments are stabilized via the natural disulfide bond between the CL domain and the CH1 domain. In addition, these single chain Fab molecules might be further stabilized by generation of interchain disulfide bonds via insertion of cysteine residues (e.g. position 44 in the variable heavy chain and position 100 in the variable light chain according to Kabat numbering).

[0177] A “crossover single chain Fab fragment” or “x-scFab” is a is a polypeptide consisting of an antibody heavy chain variable domain (VH), an antibody constant domain 1 (CH1), an antibody light chain variable domain (VL), an antibody light chain constant domain (CL) and a linker, wherein said antibody domains and said linker have one of the following orders in N-terminal to C-terminal direction: a) VH-CL-linker-VL-CH1 and b) VL-CH1-linker-VH-CL; wherein VH and VL form together an antigen-binding site which binds specifically to an antigen and wherein said linker is a polypeptide of at least 30 amino acids. In addition, these x-scFab molecules might be further stabilized by generation of interchain disulfide bonds via insertion of cysteine residues (e.g. position 44 in the variable heavy chain and position 100 in the variable light chain according to Kabat numbering).

[0178] A “single-chain variable fragment (scFv)” is a fusion protein of the variable regions of the heavy (V_{H}) and light chains (V_{L}) of an antibody, connected with a short linker peptide of ten to about 25 amino acids. The linker is usually rich in glycine for flexibility, as well as serine or threonine for solubility, and can either connect the N-terminus of the V_{H} with the C-terminus of the V_{L}, or vice versa. This protein retains the specificity of the original antibody, despite removal of the constant regions and the introduction of the linker. scFv antibodies are, e.g. described in Houston, J. S., Methods in Enzymol. 203 (1991) 46-96). In addition, antibody fragments comprise single chain polypeptides having the characteristics of a VH domain, namely being able to assemble together with a VL domain, or of a VL domain, namely being able to assemble together with a VH domain to a functional antigen binding site and thereby providing the antigen binding property of full length antibodies.

[0179] The term “Dual Variable Domain” or “DVD” refers to antigen binding molecule comprising two heavy chain polypeptides with two variable domains and two light chain polypeptides with two variable domains. In an DVD antibody (“DVD-Ig”) each half comprises a heavy chain polypeptide and a light chain polypeptide with two target binding sites. Each binding site comprises a heavy chain variable domain and a light chain variable domain with a total of 6 CDRs involved in target binding. Each variable domain (VD) in a DVD-Ig protein may be obtained from one or more “parent” monoclonal antibodies (mAbs) that bind one or more desired antigens or epitopes. The resulting DVD-Ig molecule retains activities of both parental mAbs. For further details see e.g. WO 2008/024188.

[0180] “Scaffold antigen binding proteins” are known in the art, for example, fibronectin and designed ankyrin repeat proteins (DARPins) have been used as alternative scaffolds for antigen-binding domains, see, e.g., Gebauer and Skerra, Engineered protein scaffolds as next-generation antibody therapeutics. GM Opin Chem Biol 13:245-255 (2009) and Stumpp et al., Darpins: A new generation of protein therapeutics. Drug Discovery Today 13: 695-701 (2008). In one aspect of the invention, a scaffold antigen binding protein is selected from the group consisting of CTLA-4 (Evibody), Lipocalins (Anticalin), a Protein A-derived molecule such as Z-domain of Protein A (Affibody), an A-domain (Avimer/Maxibody), a serum transferrin (trans-body); a designed ankyrin repeat protein (DARPin), a variable domain of antibody light chain or heavy chain (single-domain antibody, sdAb), a variable domain of antibody heavy chain (nanobody, a VH), V_{NAR} fragments, a fibronectin (AdNectin), a C-type lectin domain (Tetranectin); a variable domain of a new antigen receptor beta-lactamase (V_{NAR} fragments), a human gamma-crystallin or ubiquitin (Affilin molecules); a kunitz type domain of human protease inhibitors, microbodies such as the proteins from the knottin family, peptide aptamers and fibronectin (adnectin). CTLA-4 (Cytotoxic T Lymphocyte-associated Antigen 4) is a CD28-family receptor expressed on mainly CD4+ T-cells. Its extracellular domain has a variable domain-like Ig fold. Loops corresponding to CDRs of antibodies can be substituted with heterologous sequence to confer different binding properties. CTLA-4 molecules engineered to have different binding specificities are also known as Evibodies (e.g. U.S. Pat. No. 7,166,697B1). Evibodies are around the same size as the isolated variable region of an antibody (e.g. a domain antibody). For further details see Journal of Immunological Methods 248 (1-2), 31-45 (2001). Lipocalins are a family of extracellular proteins which transport small hydrophobic molecules such as steroids, bilins, retinoids and lipids. They have a rigid beta-sheet secondary structure with a number of loops at the open end of the conical structure which can be engineered to bind to different target antigens. Anticalins are between 160-180 amino acids in size, and are derived from lipocalins. For further details see Biochim Biophys Acta 1482: 337-350 (2000), U.S. Pat. No. 7,250,297B1 and US20070224633. An affibody is a scaffold derived from Protein A of Staphylococcus aureus which can be engineered to bind to antigen. The domain consists of a three-helical bundle of approximately 58 amino acids. Libraries have been generated by randomization of surface residues. For further details see Protein Eng. Des. Sel. 2004, 17, 455-462 and EP 1641818A1. Avimers are multidomain proteins derived from the A-domain scaffold family. The native domains of approximately 35 amino acids adopt a defined disulfide bonded structure. Diversity is generated by shuffling of the natural variation exhibited by the family of A-domains. For further details see Nature Biotechnology 23(12), 1556-1561 (2005) and Expert Opinion on Investigational Drugs 16(6), 909-917 (June 2007). A transferrin is a monomeric serum transport glycoprotein. Transferrins can be engineered to bind different target antigens by insertion of peptide sequences in a permissive surface loop. Examples of engineered transferrin scaffolds include the Trans-body. For further details see J. Biol. Chem 274, 24066-24073 (1999). Designed Ankyrin Repeat Proteins (DARPins) are derived from Ankyrin which is a family of proteins that mediate attachment of integral membrane proteins to the cytoskeleton. A single ankyrin repeat is a 33 residue motif consisting of two alpha-helices and a beta-turn. They can be engineered to bind different target antigens by randomizing residues in the first alpha-helix and a beta-turn of each repeat. Their binding interface can be increased by increasing the number of modules (a method of affinity maturation). For further details see J. Mol. Biol. 332, 489-503 (2003), PNAS 100(4), 1700-1705 (2003) and J. Mol. Biol. 369, 1015-1028 (2007) and US20040132028A1. A single-domain antibody is an antibody fragment consisting of a single monomeric variable antibody domain. The first single domains were derived from the variable domain of the antibody heavy chain from camelids (nanobodies or V_{H}H fragments). Furthermore, the term single-domain antibody includes an autonomous human heavy chain variable domain (aVH) or V_{NAR} fragments derived from sharks. Fibronectin is a scaffold which can be engineered to bind to antigen. Adnectins consists of a backbone of the natural amino acid sequence of the 10th domain of the 15 repeating units of human fibronectin type III (FN3). Three loops at one end of the .beta.-sandwich can be engineered to enable an Adnectin to specifically recognize a therapeutic target of interest. For further details see Protein Eng. Des. Sel. 18, 435-444 (2005), US20080139791, WO2005056764 and U.S. Pat. No. 6,818,418B1. Peptide aptamers are combinatorial recognition molecules that consist of a constant scaffold protein, typically thioredoxin (TrxA) which contains a constrained variable peptide loop inserted at the active site. For further details see Expert Opin. Biol. Ther. 5, 783-797 (2005). Microbodies are derived from naturally occurring microproteins of 25-50 amino acids in length which contain 3-4 cysteine bridges—examples of microproteins include KalataBI and conotoxin and knottins. The microproteins have a loop which can be engineered to include upto 25 amino acids without affecting the overall fold of the microprotein. For further details of engineered knottin domains, see WO2008098796.

[0181] An “antigen binding molecule that binds to the same epitope” as a reference molecule refers to an antigen binding molecule that blocks binding of the reference molecule to its antigen in a competition assay by 50% or more, and conversely, the reference molecule blocks binding of the antigen binding molecule to its antigen in a competition assay by 50% or more.

[0182] The term “antigen binding domain” or “antigen-binding site” refers to the part of an antigen binding molecule that comprises the area which specifically binds to and is complementary to part or all of an antigen. Where an antigen is large, an antigen binding molecule may only bind to a particular part of the antigen, which part is termed an epitope. An antigen binding domain may be provided by, for example, one or more variable domains (also called variable regions). Preferably, an antigen binding domain comprises an antibody light chain variable region (VL) and an antibody heavy chain variable region (VH).

[0183] As used herein, the term “antigenic determinant” is synonymous with “antigen” and “epitope,” and refers to a site (e.g. a contiguous stretch of amino acids or a conformational configuration made up of different regions of non-contiguous amino acids) on a polypeptide macromolecule to which an antigen binding moiety binds, forming an antigen binding moiety-antigen complex. Useful antigenic determinants can be found, for example, on the surfaces of tumor cells, on the surfaces of virus-infected cells, on the surfaces of other diseased cells, on the surface of immune cells, free in blood serum, and/or in the extracellular matrix (ECM). The proteins useful as antigens herein can be any native form the proteins from any vertebrate source, including mammals such as primates (e.g. humans) and rodents (e.g. mice and rats), unless otherwise indicated. In a particular embodiment the antigen is a human protein. Where reference is made to a specific protein herein, the term encompasses the “full-length”, unprocessed protein as well as any form of the protein that results from processing in the cell. The term also encompasses naturally occurring variants of the protein, e.g. splice variants or allelic variants.

[0184] By “specific binding” is meant that the binding is selective for the antigen and can be discriminated from unwanted or non-specific interactions. The ability of an antigen binding molecule to bind to a specific antigen can be measured either through an enzyme-linked immunosorbent assay (ELISA) or other techniques familiar to one of skill in the art, e.g. Surface Plasmon Resonance (SPR) technique (analyzed on a BIAcore instrument) (Liljeblad et al., Glyco J 17, 323-329 (2000)), and traditional binding assays (Heeley, Endocr Res 28, 217-229 (2002)). In one embodiment, the extent of binding of an antigen binding molecule to an unrelated protein is less than about 10% of the binding of the antigen binding molecule to the antigen as measured, e.g. by SPR. In certain embodiments, an molecule that binds to the antigen has a dissociation constant (Kd) of ≦1 μM, ≦100 nM, ≦10 nM, ≦1 nM, ≦0.1 nM, ≦0.01 nM, or ≦0.001 nM (e.g. 10⁻⁸ M or less, e.g. from 10⁻⁸ M to 10⁻¹³ M, e.g. from 10⁻⁹ M to 10⁻¹³ M).

[0185] “Affinity” or “binding affinity” refers to the strength of the sum total of non-covalent interactions between a single binding site of a molecule (e.g. an antibody) and its binding partner (e.g. an antigen). Unless indicated otherwise, as used herein, “binding affinity” refers to intrinsic binding affinity which reflects a 1:1 interaction between members of a binding pair (e.g. antibody and antigen). The affinity of a molecule X for its partner Y can generally be represented by the dissociation constant (Kd), which is the ratio of dissociation and association rate constants (koff and kon, respectively). Thus, equivalent affinities may comprise different rate constants, as long as the ratio of the rate constants remains the same. Affinity can be measured by common methods known in the art, including those described herein. A particular method for measuring affinity is Surface Plasmon Resonance (SPR).

[0186] An “affinity matured” antibody refers to an antibody with one or more alterations in one or more hypervariable regions (HVRs), compared to a parent antibody which does not possess such alterations, such alterations resulting in an improvement in the affinity of the antibody for antigen.

[0187] A “target cell antigen” as used herein refers to an antigenic determinant presented on the surface of a target cell, for example a cell in a tumor such as a cancer cell or a cell of the tumor stroma. In certain embodiments, the target cell antigen is an antigen on the surface of a tumor cell. In one embodiment, target cell antigen is selected from the group consisting of Fibroblast Activation Protein (FAP), Carcinoembryonic Antigen (CEA), Melanoma-associated Chondroitin Sulfate Proteoglycan (MCSP), Epidermal Growth Factor Receptor (EGFR), CD19, CD20 and CD33. In particular, the target cell antigen is Fibroblast Activation Protein (FAP).

[0188] The term “Fibroblast activation protein (FAP)”, also known as Prolyl endopeptidase FAP or Seprase (EC 3.4.21), refers to any native FAP from any vertebrate source, including mammals such as primates (e.g. humans) non-human primates (e.g. cynomolgus monkeys) and rodents (e.g. mice and rats), unless otherwise indicated. The term encompasses “full-length,” unprocessed FAP as well as any form of FAP that results from processing in the cell. The term also encompasses naturally occurring variants of FAP, e.g., splice variants or allelic variants. In one embodiment, the antigen binding molecule of the invention is capable of specific binding to human, mouse and/or cynomolgus FAP. The amino acid sequence of human FAP is shown in UniProt (www.uniprot.org) accession no. Q12884 (version 149, SEQ ID NO:55), or NCBI (www.ncbi.nlm.nih.gov/) RefSeq NP_004451.2. The extracellular domain (ECD) of human FAP extends from amino acid position 26 to 760. The amino acid and nucleotide sequences of a His-tagged human FAP ECD is shown in SEQ ID NOs 56 and 57, respectively. The amino acid sequence of mouse FAP is shown in UniProt accession no. P97321 (version 126, SEQ ID NO:58), or NCBI RefSeq NP_032012.1. The extracellular domain (ECD) of mouse FAP extends from amino acid position 26 to 761. SEQ ID NOs 59 and 60 show the amino acid and nucleotide sequences, respectively, of a His-tagged mouse FAP ECD. SEQ ID NOs 61 and 62 show the amino acid and nucleotide sequences, respectively, of a His-tagged cynomolgus FAP ECD. Preferably, an anti-FAP binding molecule of the invention binds to the extracellular domain of FAP.

[0189] The term “Carcinoembroynic antigen (CEA)”, also known as Carcinoembryonic antigen-related cell adhesion molecule 5 (CEACAMS), refers to any native CEA from any vertebrate source, including mammals such as primates (e.g. humans) non-human primates (e.g. cynomolgus monkeys) and rodents (e.g. mice and rats), unless otherwise indicated. The amino acid sequence of human CEA is shown in UniProt accession no. P06731 (version 151, SEQ ID NO:63). The term “Melanoma-associated Chondroitin Sulfate Proteoglycan (MCSP)”, also known as Chondroitin Sulfate Proteoglycan 4 (CSPG4) refers to any native MCSP from any vertebrate source, including mammals such as primates (e.g. humans) non-human primates (e.g. cynomolgus monkeys) and rodents (e.g. mice and rats), unless otherwise indicated. The amino acid sequence of human MCSP is shown in UniProt accession no. Q6UVK1 (version 103, SEQ ID NO:64). The term “Epidermal Growth Factor Receptor (EGFR)”, also named Proto-oncogene c-ErbB-1 or Receptor tyrosine-protein kinase erbB-1, refers to any native EGFR from any vertebrate source, including mammals such as primates (e.g. humans) non-human primates (e.g. cynomolgus monkeys) and rodents (e.g. mice and rats), unless otherwise indicated. The amino acid sequence of human EGFR is shown in UniProt accession no. P00533 (version 211, SEQ ID NO:65). The term “CD19” refers to B-lymphocyte antigen CD19, also known as B-lymphocyte surface antigen B4 or T-cell surface antigen Leu-12 and includes any native CD19 from any vertebrate source, including mammals such as primates (e.g. humans) non-human primates (e.g. cynomolgus monkeys) and rodents (e.g. mice and rats), unless otherwise indicated. The amino acid sequence of human CD19 is shown in Uniprot accession no. P15391 (version 160, SEQ ID NO:66). “CD20” refers to B-lymphocyte antigen CD20, also known as membrane-spanning 4-domains subfamily A member 1 (MS4A1), B-lymphocyte surface antigen B1 or Leukocyte surface antigen Leu-16, and includes any native CD20 from any vertebrate source, including mammals such as primates (e.g. humans) non-human primates (e.g. cynomolgus monkeys) and rodents (e.g. mice and rats), unless otherwise indicated. The amino acid sequence of human CD20 is shown in Uniprot accession no. P11836 (version 149, SEQ ID NO:67). “CD33” refers to Myeloid cell surface antigen CD33, also known as SIGLEC3 or gp67, and includes any native CD33 from any vertebrate source, including mammals such as primates (e.g. humans) non-human primates (e.g. cynomolgus monkeys) and rodents (e.g. mice and rats), unless otherwise indicated. The amino acid sequence of human CD33 is shown in Uniprot accession no. P20138 (version 157, SEQ ID NO:68).

[0190] The term “variable region” or “variable domain” refers to the domain of an antibody heavy or light chain that is involved in binding the antigen binding molecule to antigen. The variable domains of the heavy chain and light chain (VH and VL, respectively) of a native antibody generally have similar structures, with each domain comprising four conserved framework regions (FRs) and three hypervariable regions (HVRs). See, e.g., Kindt et al., Kuby Immunology, 6th ed., W.H. Freeman and Co., page 91 (2007). A single VH or VL domain may be sufficient to confer antigen-binding specificity.

[0191] The term “hypervariable region” or “HVR,” as used herein refers to each of the regions of an antibody variable domain which are hypervariable in sequence and/or form structurally defined loops (“hypervariable loops”). Generally, native four-chain antibodies comprise six HVRs; three in the VH (H1, H2, H3), and three in the VL (L1, L2, L3). HVRs generally comprise amino acid residues from the hypervariable loops and/or from the “complementarity determining regions” (CDRs), the latter being of highest sequence variability and/or involved in antigen recognition. Exemplary hypervariable loops occur at amino acid residues 26-32 (L1), 50-52 (L2), 91-96 (L3), 26-32 (H1), 53-55 (H2), and 96-101 (H3). (Chothia and Lesk, J. Mol. Biol. 196:901-917 (1987).) Exemplary CDRs (CDR-L1, CDR-L2, CDR-L3, CDR-H1, CDR-H2, and CDR-H3) occur at amino acid residues 24-34 of L1, 50-56 of L2, 89-97 of L3, 31-35B of H1, 50-65 of H2, and 95-102 of H3. (Kabat et al., Sequences of Proteins of Immunological Interest, 5th Ed. Public Health Service, National Institutes of Health, Bethesda, Md. (1991).) Hypervariable regions (HVRs) are also referred to as complementarity determining regions (CDRs), and these terms are used herein interchangeably in reference to portions of the variable region that form the antigen binding regions. This particular region has been described by Kabat et al., U.S. Dept. of Health and Human Services, “Sequences of Proteins of Immunological Interest” (1983) and by Chothia et al., J. Mol. Biol. 196:901-917 (1987), where the definitions include overlapping or subsets of amino acid residues when compared against each other. Nevertheless, application of either definition to refer to a CDR of an antibody or variants thereof is intended to be within the scope of the term as defined and used herein. The appropriate amino acid residues which encompass the CDRs as defined by each of the above cited references are set forth below in Table A as a comparison. The exact residue numbers which encompass a particular CDR will vary depending on the sequence and size of the CDR. Those skilled in the art can routinely determine which residues comprise a particular CDR given the variable region amino acid sequence of the antibody.

TABLE A
CDR Definitions¹

| CDR | Kabat | Chothia | AbM² |
|---|---|---|---|
| V_{H} CDR1 | 31-35 | 26-32 | 26-35 |
| V_{H} CDR2 | 50-65 | 52-58 | 50-58 |
| V_{H} CDR3 | 95-102 | 95-102 | 95-102 |
| V_{L} CDR1 | 24-34 | 26-32 | 24-34 |
| V_{L} CDR2 | 50-56 | 50-52 | 50-56 |
| V_{L} CDR3 | 89-97 | 91-96 | 89-97 |

¹Numbering of all CDR definitions in Table A is according to the numbering conventions set forth by Kabat et al. (see below).
²“AbM” with a lowercase “b” as used in Table A refers to the CDRs as defined by Oxford Molecular's “AbM” antibody modeling software.

[0192] Kabat et al. also defined a numbering system for variable region sequences that is applicable to any antibody. One of ordinary skill in the art can unambiguously assign this system of “Kabat numbering” to any variable region sequence, without reliance on any experimental data beyond the sequence itself. As used herein, “Kabat numbering” refers to the numbering system set forth by Kabat et al., U.S. Dept. of Health and Human Services, “Sequence of Proteins of Immunological Interest” (1983). Unless otherwise specified, references to the numbering of specific amino acid residue positions in an antibody variable region are according to the Kabat numbering system.

[0193] With the exception of CDR1 in VH, CDRs generally comprise the amino acid residues that form the hypervariable loops. CDRs also comprise “specificity determining residues,” or “SDRs,” which are residues that contact antigen. SDRs are contained within regions of the CDRs called abbreviated-CDRs, or a-CDRs. Exemplary a-CDRs (a-CDR-L1, a-CDR-L2, a-CDR-L3, a-CDR-H1, a-CDR-H2, and a-CDR-H3) occur at amino acid residues 31-34 of L1, 50-55 of L2, 89-96 of L3, 31-35B of H1, 50-58 of H2, and 95-102 of H3. (See Almagro and Fransson, Front. Biosci. 13:1619-1633 (2008).) Unless otherwise indicated, HVR residues and other residues in the variable domain (e.g., FR residues) are numbered herein according to Kabat et al., supra.

[0194] “Framework” or “FR” refers to variable domain residues other than hypervariable region (HVR) residues. The FR of a variable domain generally consists of four FR domains: FR1, FR2, FR3, and FR4. Accordingly, the HVR and FR sequences generally appear in the following sequence in VH (or VL): FR1-H1(L1)-FR2-H2(L2)-FR3-H3(L3)-FR4.

[0195] The term “chimeric” antibody refers to an antibody in which a portion of the heavy and/or light chain is derived from a particular source or species, while the remainder of the heavy and/or light chain is derived from a different source or species.

[0196] The “class” of an antibody refers to the type of constant domain or constant region possessed by its heavy chain. There are five major classes of antibodies: IgA, IgD, IgE, IgG, and IgM, and several of these may be further divided into subclasses (isotypes), e.g. IgG₁, IgG₂, IgG₃, IgG₄, IgA₁, and IgA₂. The heavy chain constant domains that correspond to the different classes of immunoglobulins are called α, δ, ε, γ, and μ respectively.

[0197] A “humanized” antibody refers to a chimeric antibody comprising amino acid residues from non-human HVRs and amino acid residues from human FRs. In certain embodiments, a humanized antibody will comprise substantially all of at least one, and typically two, variable domains, in which all or substantially all of the HVRs (e.g., CDRs) correspond to those of a non-human antibody, and all or substantially all of the FRs correspond to those of a human antibody. A humanized antibody optionally may comprise at least a portion of an antibody constant region derived from a human antibody. A “humanized form” of an antibody, e.g., a non-human antibody, refers to an antibody that has undergone humanization. Other forms of “humanized antibodies” encompassed by the present invention are those in which the constant region has been additionally modified or changed from that of the original antibody to generate the properties according to the invention, especially in regard to C1q binding and/or Fc receptor (FcR) binding.

[0198] A “human” antibody is one which possesses an amino acid sequence which corresponds to that of an antibody produced by a human or a human cell or derived from a non-human source that utilizes human antibody repertoires or other human antibody-encoding sequences. This definition of a human antibody specifically excludes a humanized antibody comprising non-human antigen-binding residues.

[0199] The term “Fc domain” or “Fe region” herein is used to define a C-terminal region of an antibody heavy chain that contains at least a portion of the constant region. The term includes native sequence Fc regions and variant Fc regions. An IgG Fc region comprises an IgG CH2 and an IgG CH3 domain. The “CH2 domain” of a human IgG Fc region usually extends from an amino acid residue at about position 231 to an amino acid residue at about position 340. In one embodiment, a carbohydrate chain is attached to the CH2 domain. The CH2 domain herein may be a native sequence CH2 domain or variant CH2 domain. The “CH3 domain” comprises the stretch of residues C-terminal to a CH2 domain in an Fc region (i.e. from an amino acid residue at about position 341 to an amino acid residue at about position 447 of an IgG). The CH3 region herein may be a native sequence CH3 domain or a variant CH3 domain (e.g. a CH3 domain with an introduced “protuberance” (“knob”) in one chain thereof and a corresponding introduced “cavity” (“hole”) in the other chain thereof; see U.S. Pat. No. 5,821,333, expressly incorporated herein by reference). Such variant CH3 domains may be used to promote heterodimerization of two non-identical antibody heavy chains as herein described. In one embodiment, a human IgG heavy chain Fc region extends from Cys226, or from Pro230, to the carboxyl-terminus of the heavy chain. However, the C-terminal lysine (Lys447) of the Fc region may or may not be present. Unless otherwise specified herein, numbering of amino acid residues in the Fc region or constant region is according to the EU numbering system, also called the EU index, as described in Kabat et al., Sequences of Proteins of Immunological Interest, 5th Ed. Public Health Service, National Institutes of Health, Bethesda, Md., 1991.

[0200] The “knob-into-hole” technology is described e.g. in U.S. Pat. No. 5,731,168; U.S. Pat. No. 7,695,936; Ridgway et al., Prot Eng 9, 617-621 (1996) and Carter, J Immunol Meth 248, 7-15 (2001). Generally, the method involves introducing a protuberance (“knob”) at the interface of a first polypeptide and a corresponding cavity (“hole”) in the interface of a second polypeptide, such that the protuberance can be positioned in the cavity so as to promote heterodimer formation and hinder homodimer formation. Protuberances are constructed by replacing small amino acid side chains from the interface of the first polypeptide with larger side chains (e.g. tyrosine or tryptophan). Compensatory cavities of identical or similar size to the protuberances are created in the interface of the second polypeptide by replacing large amino acid side chains with smaller ones (e.g. alanine or threonine). The protuberance and cavity can be made by altering the nucleic acid encoding the polypeptides, e.g. by site-specific mutagenesis, or by peptide synthesis. In a specific embodiment a knob modification comprises the amino acid substitution T366W in one of the two subunits of the Fc domain, and the hole modification comprises the amino acid substitutions T366S, L368A and Y407V in the other one of the two subunits of the Fc domain. In a further specific embodiment, the subunit of the Fc domain comprising the knob modification additionally comprises the amino acid substitution S354C, and the subunit of the Fc domain comprising the hole modification additionally comprises the amino acid substitution Y349C. Introduction of these two cysteine residues results in the formation of a disulfide bridge between the two subunits of the Fc region, thus further stabilizing the dimer (Carter, J Immunol Methods 248, 7-15 (2001)).

[0201] A “region equivalent to the Fc region of an immunoglobulin” is intended to include naturally occurring allelic variants of the Fc region of an immunoglobulin as well as variants having alterations which produce substitutions, additions, or deletions but which do not decrease substantially the ability of the immunoglobulin to mediate effector functions (such as antibody-dependent cellular cytotoxicity). For example, one or more amino acids can be deleted from the N-terminus or C-terminus of the Fc region of an immunoglobulin without substantial loss of biological function. Such variants can be selected according to general rules known in the art so as to have minimal effect on activity (see, e.g., Bowie, J. U. et al., Science 247:1306-10 (1990)).

[0202] The term “effector functions” refers to those biological activities attributable to the Fc region of an antibody, which vary with the antibody isotype. Examples of antibody effector functions include: C1q binding and complement dependent cytotoxicity (CDC), Fc receptor binding, antibody-dependent cell-mediated cytotoxicity (ADCC), antibody-dependent cellular phagocytosis (ADCP), cytokine secretion, immune complex-mediated antigen uptake by antigen presenting cells, down regulation of cell surface receptors (e.g. B cell receptor), and B cell activation.

[0203] Fc receptor binding dependent effector functions can be mediated by the interaction of the Fc-region of an antibody with Fc receptors (FcRs), which are specialized cell surface receptors on hematopoietic cells. Fc receptors belong to the immunoglobulin superfamily, and have been shown to mediate both the removal of antibody-coated pathogens by phagocytosis of immune complexes, and the lysis of erythrocytes and various other cellular targets (e.g. tumor cells) coated with the corresponding antibody, via antibody dependent cell mediated cytotoxicity (ADCC) (see e.g. Van de Winkel, J. G. and Anderson, C. L., J. Leukoc. Biol. 49 (1991) 511-524). FcRs are defined by their specificity for immunoglobulin isotypes: Fc receptors for IgG antibodies are referred to as FcγR. Fc receptor binding is described e.g. in Ravetch, J. V. and Kinet, J. P., Annu. Rev. Immunol. 9 (1991) 457-492; Capel, P. J., et al., Immunomethods 4 (1994) 25-34; de Haas, M., et al., J. Lab. Clin. Med. 126 (1995) 330-341; and Gessner, J. E., et al., Ann. Hematol. 76 (1998) 231-248.

[0204] Cross-linking of receptors for the Fc-region of IgG antibodies (FcγR) triggers a wide variety of effector functions including phagocytosis, antibody-dependent cellular cytotoxicity, and release of inflammatory mediators, as well as immune complex clearance and regulation of antibody production. In humans, three classes of FcγR have been characterized, which are:
[0205] FcγRI (CD64) binds monomeric IgG with high affinity and is expressed on macrophages, monocytes, neutrophils and eosinophils. Modification in the Fc-region IgG at least at one of the amino acid residues E233-G236, P238, D265, N297, A327 and P329 (numbering according to EU index of Kabat) reduce binding to FcγRI. IgG2 residues at positions 233-236, substituted into IgG1 and IgG4, reduced binding to FcγRI by 10³-fold and eliminated the human monocyte response to antibody-sensitized red blood cells (Armour, K. L., et al., Eur. J. Immunol. 29 (1999) 2613-2624).
[0206] FcγRII (CD32) binds complexed IgG with medium to low affinity and is widely expressed. This receptor can be divided into two sub-types, FcγRIIA and FcγRIIB. FcγRIIA is found on many cells involved in killing (e.g. macrophages, monocytes, neutrophils) and seems able to activate the killing process. FcγRIIB seems to play a role in inhibitory processes and is found on B cells, macrophages and on mast cells and eosinophils. On B-cells it seems to function to suppress further immunoglobulin production and isotype switching to, for example, the IgE class. On macrophages, FcγRIIB acts to inhibit phagocytosis as mediated through FcγRIIA. On eosinophils and mast cells the B-form may help to suppress activation of these cells through IgE binding to its separate receptor. Reduced binding for FcγRIIA is found e.g. for antibodies comprising an IgG Fc-region with mutations at least at one of the amino acid residues E233-G236, P238, D265, N297, A327, P329, D270, Q295, A327, R292, and K414 (numbering according to EU index of Kabat).
[0207] FcγRIII (CD16) binds IgG with medium to low affinity and exists as two types. FcγRIIIA is found on NK cells, macrophages, eosinophils and some monocytes and T cells and mediates ADCC. FcγRIIIB is highly expressed on neutrophils. Reduced binding to FcγRIIIA is found e.g. for antibodies comprising an IgG Fc-region with mutation at least at one of the amino acid residues E233-G236, P238, D265, N297, A327, P329, D270, Q295, A327, 5239, E269, E293, Y296, V303, A327, K338 and D376 (numbering according to EU index of Kabat).

[0208] Mapping of the binding sites on human IgG1 for Fc receptors, the above mentioned mutation sites and methods for measuring binding to FcγRI and FcγRIIA are described in Shields, R. L., et al. J. Biol. Chem. 276 (2001) 6591-6604.

[0209] The term “ADCC” or “antibody-dependent cellular cytotoxicity” is a function mediated by Fc receptor binding and refers to lysis of target cells by an antibody as reported herein in the presence of effector cells. The capacity of the antibody to induce the initial steps mediating ADCC is investigated by measuring their binding to Fcγ receptors expressing cells, such as cells, recombinantly expressing FcγRI and/or FcγRIIA or NK cells (expressing essentially FcγRIIIA). In particular, binding to FcγR on NK cells is measured.

[0210] An “activating Fc receptor” is an Fc receptor that following engagement by an Fc region of an antibody elicits signaling events that stimulate the receptor-bearing cell to perform effector functions. Activating Fc receptors include FcγRIIIa (CD16a), FcγRI (CD64), FcγRIIa (CD32), and FcαRI (CD89). A particular activating Fc receptor is human FcγRIIIa (see UniProt accession no. P08637, version 141).

[0211] The “Tumor Necrosis factor receptor superfamily” or “TNF receptor superfamily” currently consists of 27 receptors. It is a group of cytokine receptors characterized by the ability to bind tumor necrosis factors (TNFs) via an extracellular cysteine-rich domain (CRD). These pseudorepeats are defined by intrachain disulphides generated by highly conserved cysteine residues within the receptor chains. With the exception of nerve growth factor (NGF), all TNFs are homologous to the archetypal TNF-alpha. In their active form, the majority of TNF receptors form trimeric complexes in the plasma membrane. Accordingly, most TNF receptors contain transmembrane domains (TMDs). Several of these receptors also contain intracellular death domains (DDs) that recruit caspase-interacting proteins following ligand binding to initiate the extrinsic pathway of caspase activation. Other TNF superfamily receptors that lack death domains bind TNF receptor-associated factors and activate intracellular signaling pathways that can lead to proliferation or differentiation. These receptors can also initiate apoptosis, but they do so via indirect mechanisms. In addition to regulating apoptosis, several TNF superfamily receptors are involved in regulating immune cell functions such as B cell homeostasis and activation, natural killer cell activation, and T cell co-stimulation. Several others regulate cell type-specific responses such as hair follicle development and osteoclast development. Members of the TNF receptor superfamily include the following: Tumor necrosis factor receptor 1 (1A) (TNFRSF1A, CD120a), Tumor necrosis factor receptor 2 (1B) (TNFRSF1B, CD120b), Lymphotoxin beta receptor (LTBR, CD18), OX40 (TNFRSF4, CD134), CD40 (Bp50), Fas receptor (Apo-1, CD95, FAS), Decoy receptor 3 (TR6, M68, TNFRSF6B), CD27 (S152, Tp55), CD30 (Ki-1, TNFRSF8), 4-1BB (CD137, TNFRSF9), DR4 (TRAILR1, Apo-2, CD261, TNFRSF10A), DR5 (TRAILR2, CD262, TNFRSF10B), Decoy Receptor 1 (TRAILR3, CD263, TNFRSF10C), Decoy Receptor 2 (TRAILR4, CD264, TNFRSF10D), RANK (CD265, TNFRSF11A), Osteoprotegerin (OCIF, TR1, TNFRSF11B), TWEAK receptor (Fn14, CD266, TNFRSF12A), TACI (CD267, TNFRSF13B), BAFF receptor (CD268, TNFRSF13C), Herpesvirus entry mediator (HVEM, TR2, CD270, TNFRSF14), Nerve growth factor receptor (p75NTR, CD271, NGFR), B-cell maturation antigen (CD269, TNFRSF17), Glucocorticoid-induced TNFR-related (GITR, AITR, CD357, TNFRSF18), TROY (TNFRSF19), DR6 (CD358, TNFRSF21), DR3 (Apo-3, TRAMP, WS-1, TNFRSF25) and Ectodysplasin A2 receptor (XEDAR, EDA2R).

[0212] Several members of the tumor necrosis factor receptor (TNFR) family function after initial T cell activation to sustain T cell responses. The term “costimulatory TNF receptor family member” or “costimulatory TNF receptor superfamily member” or “costimulatory TNF superfamily receptor” refers to a subgroup of TNF receptor superfamily members, which are able to costimulate proliferation and cytokine production of T-cells. The term refers to any native TNF family receptor from any vertebrate source, including mammals such as primates (e.g. humans), non-human primates (e.g. cynomolgus monkeys) and rodents (e.g. mice and rats), unless otherwise indicated. In specific embodiments of the invention, costimulatory TNF receptor superfamily members are selected from the group consisting of OX40 (CD134), 4-1BB (CD137), CD27, HVEM (CD270), CD30, and GITR, all of which can have costimulatory effects on T cells. More particularly, the costimulatory TNF receptor superfamily member is selected from the group consisting of OX40 and 4-1BB.

[0213] Further information, in particular sequences, of the TNF receptor superfamily members may be obtained from publically accessible databases such as Uniprot (www.uniprot.org). For instance, the human costimulatory TNF receptors have the following amino acid sequences: human OX40 (UniProt accession no. P43489, SEQ ID NO:69), human 4-1BB (UniProt accession no. Q07011, SEQ ID NO:70), human CD27 (UniProt accession no. P26842, SEQ ID NO:71), human HVEM (UniProt accession no. Q92956, SEQ ID NO:72), human CD30 (UniProt accession no. P28908, SEQ ID NO:73), and human GITR (UniProt accession no. Q9Y5U5, SEQ ID NO:74).

[0214] The term “OX40”, as used herein, refers to any native OX40 from any vertebrate source, including mammals such as primates (e.g. humans) and rodents (e.g., mice and rats), unless otherwise indicated. The term encompasses “full-length,” unprocessed OX40 as well as any form of OX40 that results from processing in the cell. The term also encompasses naturally occurring variants of OX40, e.g., splice variants or allelic variants. The amino acid sequence of an exemplary human OX40 is shown in SEQ ID NO: 1 (Uniprot P43489, version 112) and the amino acid sequence of an exemplary murine OX40 is shown in SEQ ID NO: 75 (Uniprot P47741, version 101).

[0215] The terms “anti-OX40 antibody”, “anti-OX40”, “OX40 antibody and “an antibody that specifically binds to OX40” refer to an antibody that is capable of binding OX40 with sufficient affinity such that the antibody is useful as a diagnostic and/or therapeutic agent in targeting OX40. In one embodiment, the extent of binding of an anti-OX40 antibody to an unrelated, non-OX40 protein is less than about 10% of the binding of the antibody to OX40 as measured, e.g., by a radioimmunoassay (RIA) or flow cytometry (FACS). In certain embodiments, an antibody that binds to OX40 has a dissociation constant (K_{D}) of ≦1 μM, ≦100 nM, ≦10 nM, ≦1 nM, ≦0.1 nM, ≦0.01 nM, or ≦0.001 nM (e.g. 10⁻⁶M or less, e.g. from 10⁻⁶⁸M to 10⁻¹³M, e.g., from 10⁻⁸M to 10⁻¹⁰ M).

[0216] The term “4-1BB”, as used herein, refers to any native 4-1BB from any vertebrate source, including mammals such as primates (e.g. humans) and rodents (e.g., mice and rats), unless otherwise indicated. The term encompasses “full-length,” unprocessed 4-1BB as well as any form of 4-1BB that results from processing in the cell. The term also encompasses naturally occurring variants of 4-1BB, e.g., splice variants or allelic variants. The amino acid sequence of an exemplary human 4-1BB is shown in SEQ ID NO: 70 (Uniprot accession no. Q07011), the amino acid sequence of an exemplary murine 4-1BB is shown in SEQ ID NO: 76 (Uniprot accession no. P20334) and the amino acid sequence of an exemplary cynomolgous 4-1BB (from Macaca mulatta) is shown in SEQ ID NO:77 (Uniprot accession no. F6W5G6).

[0217] The terms “anti-4-1BB antibody”, “anti-4-1BB”, “4-1BB antibody and “an antibody that specifically binds to 4-1BB” refer to an antibody that is capable of binding 4-1BB with sufficient affinity such that the antibody is useful as a diagnostic and/or therapeutic agent in targeting 4-1BB. In one embodiment, the extent of binding of an anti-4-1BB antibody to an unrelated, non-4-1BB protein is less than about 10% of the binding of the antibody to 4-1BB as measured, e.g., by a radioimmunoassay (RIA) or flow cytometry (FACS). In certain embodiments, an antibody that binds to 4-1BB has a dissociation constant (K_{D}) of ≦1 μM, ≦100 nM, ≦10 nM, ≦1 nM, ≦0.1 nM, ≦0.01 nM, or ≦0.001 nM (e.g. 10⁻⁶M or less, e.g. from 10⁻⁶⁸M to 10⁻¹³M, e.g., from 10⁻⁸M to 10⁻¹⁰ M).

[0218] The term “GITR”, as used herein, refers to any native GITR from any vertebrate source, including mammals such as primates (e.g. humans) and rodents (e.g., mice and rats), unless otherwise indicated. The term encompasses “full-length,” unprocessed GITR as well as any form of GITR that results from processing in the cell. The term also encompasses naturally occurring variants of GITR, e.g., splice variants or allelic variants. The amino acid sequence of an exemplary human GITR is shown in SEQ ID NO: 74 (Uniprot P43489, version 112).

[0219] The terms “anti-GITR antibody”, “anti-GITR”, “GITR antibody and “an antibody that specifically binds to GITR” refer to an antibody that is capable of binding GITR with sufficient affinity such that the antibody is useful as a diagnostic and/or therapeutic agent in targeting GITR. In one aspect, the extent of binding of an anti-GITR antibody to an unrelated, non-GITR protein is less than about 10% of the binding of the antibody to GITR as measured, e.g., by a radioimmunoassay (RIA) or flow cytometry (FACS). In certain embodiments, an antibody that binds to GITR has a dissociation constant (K_{D}) of ≦1 μM, ≦100 nM, ≦10 nM, ≦1 nM, ≦0.1 nM, ≦0.01 nM, or ≦0.001 nM (e.g. 10⁻⁶M or less, e.g. from 10⁻⁶⁸M to 10⁻¹³M, e.g., from 10⁻⁸M to 10⁻¹⁰ M).

[0220] The term “peptide linker” refers to a peptide comprising one or more amino acids, typically about 2 to 20 amino acids. Peptide linkers are known in the art or are described herein. Suitable, non-immunogenic linker peptides are, for example, (G₄S)ₙ, (SG₄)ₙ or G₄(SG₄)ₙ peptide linkers, wherein “n” is generally a number between 1 and 10, typically between 2 and 4, in particular 2, i.e. the peptides selected from the group consisting of GGGGS (SEQ ID NO: 78) GGGGSGGGGS (SEQ ID NO:79), SGGGGSGGGG (SEQ ID NO:80) and GGGGSGGGGSGGGG (SEQ ID NO:81), but also include the sequences GSPGSSSSGS (SEQ ID NO:82), (G45)₃ (SEQ ID NO:83), (G45)₄ (SEQ ID NO:84), GSGSGSGS (SEQ ID NO:85), GSGSGNGS (SEQ ID NO:86), GGSGSGSG (SEQ ID NO:87), GGSGSG (SEQ ID NO:88), GGSG (SEQ ID NO:89), GGSGNGSG (SEQ ID NO:90), GGNGSGSG (SEQ ID NO:91) and GGNGSG (SEQ ID NO:92). Peptide linkers of particular interest are (G4S) (SEQ ID NO:78), (G₄S)₂ or GGGGSGGGGS (SEQ ID NO:79) and (G4S)₄ (SEQ ID NO:84).

[0221] The term “amino acid” as used within this application denotes the group of naturally occurring carboxy α-amino acids comprising alanine (three letter code: ala, one letter code: A), arginine (arg, R), asparagine (asn, N), aspartic acid (asp, D), cysteine (cys, C), glutamine (gln, Q), glutamic acid (glu, E), glycine (gly, G), histidine (his, H), isoleucine (ile, I), leucine (leu, L), lysine (lys, K), methionine (met, M), phenylalanine (phe, F), proline (pro, P), serine (ser, S), threonine (thr, T), tryptophan (trp, W), tyrosine (tyr, Y), and valine (val, V).

[0222] By “fused” or “connected” is meant that the components (e.g. a heavy chain of an antibody and a Fab fragment) are linked by peptide bonds, either directly or via one or more peptide linkers.

[0223] “Percent (%) amino acid sequence identity” with respect to a reference polypeptide (protein) sequence is defined as the percentage of amino acid residues in a candidate sequence that are identical with the amino acid residues in the reference polypeptide sequence, after aligning the sequences and introducing gaps, if necessary, to achieve the maximum percent sequence identity, and not considering any conservative substitutions as part of the sequence identity. Alignment for purposes of determining percent amino acid sequence identity can be achieved in various ways that are within the skill in the art, for instance, using publicly available computer software such as BLAST, BLAST-2, ALIGN. SAWI or Megalign (DNASTAR) software. Those skilled in the art can determine appropriate parameters for aligning sequences, including any algorithms needed to achieve maximal alignment over the full length of the sequences being compared. For purposes herein, however, % amino acid sequence identity values are generated using the sequence comparison computer program ALIGN-2. The ALIGN-2 sequence comparison computer program was authored by Genentech, Inc., and the source code has been filed with user documentation in the U.S. Copyright Office, Washington D.C., 20559, where it is registered under U.S. Copyright Registration No. TXU510087. The ALIGN-2 program is publicly available from Genentech, Inc., South San Francisco, Calif., or may be compiled from the source code. The ALIGN-2 program should be compiled for use on a UNIX operating system, including digital UNIX V4.0D. All sequence comparison parameters are set by the ALIGN-2 program and do not vary. In situations where ALIGN-2 is employed for amino acid sequence comparisons, the % amino acid sequence identity of a given amino acid sequence A to, with, or against a given amino acid sequence B (which can alternatively be phrased as a given amino acid sequence A that has or comprises a certain % amino acid sequence identity to, with, or against a given amino acid sequence B) is calculated as follows:

100 times the fraction X/Y

[0224] where X is the number of amino acid residues scored as identical matches by the sequence alignment program ALIGN-2 in that program's alignment of A and B, and where Y is the total number of amino acid residues in B. It will be appreciated that where the length of amino acid sequence A is not equal to the length of amino acid sequence B, the % amino acid sequence identity of A to B will not equal the % amino acid sequence identity of B to A. Unless specifically stated otherwise, all % amino acid sequence identity values used herein are obtained as described in the immediately preceding paragraph using the ALIGN-2 computer program.

[0225] In certain embodiments, amino acid sequence variants of the TNF ligand trimer-containing antigen binding molecules provided herein are contemplated. For example, it may be desirable to improve the binding affinity and/or other biological properties of the TNF ligand trimer-containing antigen binding molecules. Amino acid sequence variants of the TNF ligand trimer-containing antigen binding molecules may be prepared by introducing appropriate modifications into the nucleotide sequence encoding the molecules, or by peptide synthesis. Such modifications include, for example, deletions from, and/or insertions into and/or substitutions of residues within the amino acid sequences of the antibody. Any combination of deletion, insertion, and substitution can be made to arrive at the final construct, provided that the final construct possesses the desired characteristics, e.g., antigen-binding. Sites of interest for substitutional mutagenesis include the HVRs and Framework (FRs). Conservative substitutions are provided in Table B under the heading “Preferred Substitutions” and further described below in reference to amino acid side chain classes (1) to (6). Amino acid substitutions may be introduced into the molecule of interest and the products screened for a desired activity, e.g., retained/improved antigen binding, decreased immunogenicity, or improved ADCC or CDC.

TABLE B

| Original | | Preferred |
|---|---|---|
| Residue | Exemplary Substitutions | Substitutions |
| Ala (A) | Val; Leu; Ile | Val |
| Arg (R) | Lys; Gln; Asn | Lys |
| Asn (N) | Gln; His; Asp, Lys; Arg | Gln |
| Asp (D) | Glu; Asn | Glu |
| Cys (C) | Ser; Ala | Ser |
| Gln (Q) | Asn; Glu | Asn |
| Glu (E) | Asp; Gln | Asp |
| Gly (G) | Ala | Ala |
| His (H) | Asn; Gln; Lys; Arg | Arg |
| Ile (I) | Leu; Val; Met; Ala; Phe; Norleucine | Leu |
| Leu (L) | Norleucine; Ile; Val; Met; Ala; Phe | Ile |
| Lys (K) | Arg; Gln; Asn | Arg |
| Met (M) | Leu; Phe; Ile | Leu |
| Phe (F) | Trp; Leu; Val; Ile; Ala; Tyr | Tyr |
| Pro (P) | Ala | Ala |
| Ser (S) | Thr | Thr |
| Thr (T) | Val; Ser | Ser |
| Trp (W) | Tyr; Phe | Tyr |
| Tyr (Y) | Trp; Phe; Thr; Ser | Phe |
| Val (V) | Ile; Leu; Met; Phe; Ala; Norleucine | Leu |

[0226] Amino acids may be grouped according to common side-chain properties:
[0227] (1) hydrophobic: Norleucine, Met, Ala, Val, Leu, Ile;
[0228] (2) neutral hydrophilic: Cys, Ser, Thr, Asn, Gln;
[0229] (3) acidic: Asp, Glu;
[0230] (4) basic: His, Lys, Arg;
[0231] (5) residues that influence chain orientation: Gly, Pro;
[0232] (6) aromatic: Trp, Tyr, Phe.

[0233] Non-conservative substitutions will entail exchanging a member of one of these classes for another class.

[0234] The term “amino acid sequence variants” includes substantial variants wherein there are amino acid substitutions in one or more hypervariable region residues of a parent antigen binding molecule (e.g. a humanized or human antibody). Generally, the resulting variant(s) selected for further study will have modifications (e.g., improvements) in certain biological properties (e.g., increased affinity, reduced immunogenicity) relative to the parent antigen binding molecule and/or will have substantially retained certain biological properties of the parent antigen binding molecule. An exemplary substitutional variant is an affinity matured antibody, which may be conveniently generated, e.g., using phage display-based affinity maturation techniques such as those described herein. Briefly, one or more HVR residues are mutated and the variant antigen binding molecules displayed on phage and screened for a particular biological activity (e.g. binding affinity). In certain embodiments, substitutions, insertions, or deletions may occur within one or more HVRs so long as such alterations do not substantially reduce the ability of the antigen binding molecule to bind antigen. For example, conservative alterations (e.g., conservative substitutions as provided herein) that do not substantially reduce binding affinity may be made in HVRs. A useful method for identification of residues or regions of an antibody that may be targeted for mutagenesis is called “alanine scanning mutagenesis” as described by Cunningham and Wells (1989) Science, 244:1081-1085. In this method, a residue or group of target residues (e.g., charged residues such as Arg, Asp, His, Lys, and Glu) are identified and replaced by a neutral or negatively charged amino acid (e.g., alanine or polyalanine) to determine whether the interaction of the antibody with antigen is affected. Further substitutions may be introduced at the amino acid locations demonstrating functional sensitivity to the initial substitutions. Alternatively, or additionally, a crystal structure of an antigen-antigen binding molecule complex to identify contact points between the antibody and antigen. Such contact residues and neighboring residues may be targeted or eliminated as candidates for substitution. Variants may be screened to determine whether they contain the desired properties.

[0235] Amino acid sequence insertions include amino- and/or carboxyl-terminal fusions ranging in length from one residue to polypeptides containing a hundred or more residues, as well as intrasequence insertions of single or multiple amino acid residues. Examples of terminal insertions include bispecific antigen binding molecules of the invention with an N-terminal methionyl residue. Other insertional variants of the molecule include the fusion to the N- or C-terminus to a polypeptide which increases the serum half-life of the bispecific antigen binding molecules.

[0236] In certain aspects, the bispecific antigen binding molecules provided herein are altered to increase or decrease the extent to which the antibody is glycosylated. Glycosylation variants of the molecules may be conveniently obtained by altering the amino acid sequence such that one or more glycosylation sites is created or removed. Where the TNF ligand trimer-containing antigen binding molecule comprises an Fc region, the carbohydrate attached thereto may be altered. Native antibodies produced by mammalian cells typically comprise a branched, biantennary oligosaccharide that is generally attached by an N-linkage to Asn297 of the CH2 domain of the Fc region. See, e.g., Wright et al. TIBTECH 15:26-32 (1997). The oligosaccharide may include various carbohydrates, e.g., mannose, N-acetyl glucosamine (GlcNAc), galactose, and sialic acid, as well as a fucose attached to a GlcNAc in the “stem” of the biantennary oligosaccharide structure. In some embodiments, modifications of the oligosaccharide in TNF family ligand trimer-containing antigen binding molecule may be made in order to create variants with certain improved properties. In one aspect, variants of bispecific antigen binding molecules or antibodies of the invention are provided having a carbohydrate structure that lacks fucose attached (directly or indirectly) to an Fc region. Such fucosylation variants may have improved ADCC function, see e.g. US Patent Publication Nos. US 2003/0157108 (Presta, L.) or US 2004/0093621 (Kyowa Hakko Kogyo Co., Ltd). In another aspect, variants of the bispecific antigen binding molecules or antibodies of the invention are provided with bisected oligosaccharides, e.g., in which a biantennary oligosaccharide attached to the Fc region is bisected by GlcNAc. Such variants may have reduced fucosylation and/or improved ADCC function, see for example WO 2003/011878 (Jean-Mairet et al.); U.S. Pat. No. 6,602,684 (Umana et al.); and US 2005/0123546 (Umana et al.). Variants with at least one galactose residue in the oligosaccharide attached to the Fc region are also provided. Such antibody variants may have improved CDC function and are described, e.g., in WO 1997/30087 (Patel et al.); WO 1998/58964 (Raju, S.); and WO 1999/22764 (Raju, S.).

[0237] In certain aspects, it may be desirable to create cysteine engineered variants of the bispecific antigen binding molecules of the invention, e.g., “thioMAbs,” in which one or more residues of the molecule are substituted with cysteine residues. In particular aspects, the substituted residues occur at accessible sites of the molecule. By substituting those residues with cysteine, reactive thiol groups are thereby positioned at accessible sites of the antibody and may be used to conjugate the antibody to other moieties, such as drug moieties or linker-drug moieties, to create an immunoconjugate. In certain aspects, any one or more of the following residues may be substituted with cysteine: V205 (Kabat numbering) of the light chain; A118 (EU numbering) of the heavy chain; and S400 (EU numbering) of the heavy chain Fc region. Cysteine engineered antigen binding molecules may be generated as described, e.g., in U.S. Pat. No. 7,521,541.

[0238] The term “polynucleotide” refers to an isolated nucleic acid molecule or construct, e.g. messenger RNA (mRNA), virally-derived RNA, or plasmid DNA (pDNA). A polynucleotide may comprise a conventional phosphodiester bond or a non-conventional bond (e.g. an amide bond, such as found in peptide nucleic acids (PNA). The term “nucleic acid molecule” refers to any one or more nucleic acid segments, e.g. DNA or RNA fragments, present in a polynucleotide.

[0239] By “isolated” nucleic acid molecule or polynucleotide is intended a nucleic acid molecule, DNA or RNA, which has been removed from its native environment. For example, a recombinant polynucleotide encoding a polypeptide contained in a vector is considered isolated for the purposes of the present invention. Further examples of an isolated polynucleotide include recombinant polynucleotides maintained in heterologous host cells or purified (partially or substantially) polynucleotides in solution. An isolated polynucleotide includes a polynucleotide molecule contained in cells that ordinarily contain the polynucleotide molecule, but the polynucleotide molecule is present extrachromosomally or at a chromosomal location that is different from its natural chromosomal location. Isolated RNA molecules include in vivo or in vitro RNA transcripts of the present invention, as well as positive and negative strand forms, and double-stranded forms. Isolated polynucleotides or nucleic acids according to the present invention further include such molecules produced synthetically. In addition, a polynucleotide or a nucleic acid may be or may include a regulatory element such as a promoter, ribosome binding site, or a transcription terminator.

[0240] By a nucleic acid or polynucleotide having a nucleotide sequence at least, for example, 95% “identical” to a reference nucleotide sequence of the present invention, it is intended that the nucleotide sequence of the polynucleotide is identical to the reference sequence except that the polynucleotide sequence may include up to five point mutations per each 100 nucleotides of the reference nucleotide sequence. In other words, to obtain a polynucleotide having a nucleotide sequence at least 95% identical to a reference nucleotide sequence, up to 5% of the nucleotides in the reference sequence may be deleted or substituted with another nucleotide, or a number of nucleotides up to 5% of the total nucleotides in the reference sequence may be inserted into the reference sequence. These alterations of the reference sequence may occur at the 5′ or 3′ terminal positions of the reference nucleotide sequence or anywhere between those terminal positions, interspersed either individually among residues in the reference sequence or in one or more contiguous groups within the reference sequence. As a practical matter, whether any particular polynucleotide sequence is at least 80%, 85%, 90%, 95%, 96%, 97%, 98% or 99% identical to a nucleotide sequence of the present invention can be determined conventionally using known computer programs, such as the ones discussed above for polypeptides (e.g. ALIGN-2).

[0241] The term “expression cassette” refers to a polynucleotide generated recombinantly or synthetically, with a series of specified nucleic acid elements that permit transcription of a particular nucleic acid in a target cell. The recombinant expression cassette can be incorporated into a plasmid, chromosome, mitochondrial DNA, plastid DNA, virus, or nucleic acid fragment. Typically, the recombinant expression cassette portion of an expression vector includes, among other sequences, a nucleic acid sequence to be transcribed and a promoter. In certain embodiments, the expression cassette of the invention comprises polynucleotide sequences that encode bispecific antigen binding molecules of the invention or fragments thereof.

[0242] The term “vector” or “expression vector” is synonymous with “expression construct” and refers to a DNA molecule that is used to introduce and direct the expression of a specific gene to which it is operably associated in a target cell. The term includes the vector as a self-replicating nucleic acid structure as well as the vector incorporated into the genome of a host cell into which it has been introduced. The expression vector of the present invention comprises an expression cassette. Expression vectors allow transcription of large amounts of stable mRNA. Once the expression vector is inside the target cell, the ribonucleic acid molecule or protein that is encoded by the gene is produced by the cellular transcription and/or translation machinery. In one embodiment, the expression vector of the invention comprises an expression cassette that comprises polynucleotide sequences that encode bispecific antigen binding molecules of the invention or fragments thereof.

[0243] The terms “host cell”, “host cell line,” and “host cell culture” are used interchangeably and refer to cells into which exogenous nucleic acid has been introduced, including the progeny of such cells. Host cells include “transformants” and “transformed cells,” which include the primary transformed cell and progeny derived therefrom without regard to the number of passages. Progeny may not be completely identical in nucleic acid content to a parent cell, but may contain mutations. Mutant progeny that have the same function or biological activity as screened or selected for in the originally transformed cell are included herein. A host cell is any type of cellular system that can be used to generate the bispecific antigen binding molecules of the present invention. Host cells include cultured cells, e g mammalian cultured cells, such as CHO cells, BHK cells, NS0 cells, SP2/0 cells, YO myeloma cells, P3X63 mouse myeloma cells, PER cells, PER.C6 cells or hybridoma cells, yeast cells, insect cells, and plant cells, to name only a few, but also cells comprised within a transgenic animal, transgenic plant or cultured plant or animal tissue.

[0244] An “effective amount” of an agent refers to the amount that is necessary to result in a physiological change in the cell or tissue to which it is administered.

[0245] A “therapeutically effective amount” of an agent, e.g. a pharmaceutical composition, refers to an amount effective, at dosages and for periods of time necessary, to achieve the desired therapeutic or prophylactic result. A therapeutically effective amount of an agent for example eliminates, decreases, delays, minimizes or prevents adverse effects of a disease.

[0246] An “individual” or “subject” is a mammal Mammals include, but are not limited to, domesticated animals (e.g. cows, sheep, cats, dogs, and horses), primates (e.g. humans and non-human primates such as monkeys), rabbits, and rodents (e.g. mice and rats). Particularly, the individual or subject is a human.

[0247] The term “pharmaceutical composition” refers to a preparation which is in such form as to permit the biological activity of an active ingredient contained therein to be effective, and which contains no additional components which are unacceptably toxic to a subject to which the formulation would be administered.

[0248] A “pharmaceutically acceptable excipient” refers to an ingredient in a pharmaceutical composition, other than an active ingredient, which is nontoxic to a subject. A pharmaceutically acceptable excipient includes, but is not limited to, a buffer, a stabilizer, or a preservative.

[0249] The term “package insert” is used to refer to instructions customarily included in commercial packages of therapeutic products, that contain information about the indications, usage, dosage, administration, combination therapy, contraindications and/or warnings concerning the use of such therapeutic products.

[0250] As used herein, “treatment” (and grammatical variations thereof such as “treat” or “treating”) refers to clinical intervention in an attempt to alter the natural course of the individual being treated, and can be performed either for prophylaxis or during the course of clinical pathology. Desirable effects of treatment include, but are not limited to, preventing occurrence or recurrence of disease, alleviation of symptoms, diminishment of any direct or indirect pathological consequences of the disease, preventing metastasis, decreasing the rate of disease progression, amelioration or palliation of the disease state, and remission or improved prognosis. In some embodiments, the molecules of the invention are used to delay development of a disease or to slow the progression of a disease.

[0251] The term “cancer” as used herein refers to proliferative diseases, such as lymphomas, lymphocytic leukemias, lung cancer, non-small cell lung (NSCL) cancer, bronchioloalviolar cell lung cancer, bone cancer, pancreatic cancer, skin cancer, cancer of the head or neck, cutaneous or intraocular melanoma, uterine cancer, ovarian cancer, rectal cancer, cancer of the anal region, stomach cancer, gastric cancer, colon cancer, breast cancer, uterine cancer, carcinoma of the fallopian tubes, carcinoma of the endometrium, carcinoma of the cervix, carcinoma of the vagina, carcinoma of the vulva, Hodgkin's Disease, cancer of the esophagus, cancer of the small intestine, cancer of the endocrine system, cancer of the thyroid gland, cancer of the parathyroid gland, cancer of the adrenal gland, sarcoma of soft tissue, cancer of the urethra, cancer of the penis, prostate cancer, cancer of the bladder, cancer of the kidney or ureter, renal cell carcinoma, carcinoma of the renal pelvis, mesothelioma, hepatocellular cancer, biliary cancer, neoplasms of the central nervous system (CNS), spinal axis tumors, brain stem glioma, glioblastoma multiforme, astrocytomas, schwanomas, ependymonas, medulloblastomas, meningiomas, squamous cell carcinomas, pituitary adenoma and Ewings sarcoma, including refractory versions of any of the above cancers, or a combination of one or more of the above cancers.

[0252] Bispecific Antibodies of the Invention

[0253] The invention provides novel bispecific antigen binding molecules with particularly advantageous properties such as producibility, stability, binding affinity, biological activity, targeting efficiency and reduced toxicity.

[0254] Exemplary Bispecific Antigen Binding Molecules

[0255] In one aspect, the invention provides bispecific antigen binding molecules, comprising
[0256] (a) four moieties capable of specific binding to a costimulatory TNF receptor family member,
[0257] (b) at least one moiety capable of specific binding to a target cell antigen, and
[0258] (c) a Fc domain composed of a first and a second subunit capable of stable association.

[0259] In a particular aspect, these bispecific antigen binding molecules are characterized by agonistic binding to a costimulatory TNF receptor family member. Particularly, the costimulatory TNF receptor family member is selected from the group consisting of OX40, 4-1BB and GITR. More particularly, the costimulatory TNF receptor family member is selected from the group consisting of OX40 and 4-1BB.

[0260] Bispecific Tetravalent Antigen Binding Molecules Binding to OX40

[0261] In one aspect, the costimulatory TNF receptor family member is OX40. Particularly, the invention provides bispecific antigen binding molecules, wherein the moiety capable of specific binding to a costimulatory TNF receptor family member binds to a polypeptide comprising the amino acid sequence of SEQ ID NO:1.

[0262] In one aspect, provided is a bispecific antigen binding molecule, comprising four moieties capable of specific binding to OX40, wherein said moieties comprise a VH domain comprising
[0263] (i) a CDR-H1 comprising the amino acid sequence selected from the group consisting of SEQ ID NO:2 and SEQ ID NO:3,
[0264] (ii) a CDR-H2 comprising the amino acid sequence selected from the group consisting of SEQ ID NO:4 and SEQ ID NO:5, and
[0265] (iii) a CDR-H3 comprising the amino acid sequence selected from the group consisting of SEQ ID NO:6, SEQ ID NO:7, SEQ ID NO:8, SEQ ID NO: 9, SEQ ID NO:10, SEQ ID NO:11 and SEQ ID NO:12, and a VL domain comprising
[0266] (iv) a CDR-L1 comprising the amino acid sequence selected from the group consisting of SEQ ID NO:13, SEQ ID NO:14 and SEQ ID NO:15,
[0267] (v) a CDR-L2 comprising the amino acid sequence selected from the group consisting of SEQ ID NO:16, SEQ ID NO:17 and SEQ ID NO:18, and
[0268] (vi) a CDR-L3 comprising the amino acid sequence selected from the group consisting of SEQ ID NO:19, SEQ ID NO:20, SEQ ID NO:21, SEQ ID NO:22, SEQ ID NO:23 and SEQ ID NO:24.

[0269] In particular, provided is a bispecific antigen binding molecule, comprising four moieties capable of specific binding to OX40, wherein said moieties comprise

[0270] (a) a VH domain comprising CDR-H1 comprising the amino acid sequence of SEQ ID NO:2, CDR-H2 comprising the amino acid sequence of SEQ ID NO:4, CDR-H3 comprising the amino acid sequence of SEQ ID NO:6 and a VL domain comprising CDR-L1 comprising the amino acid sequence of SEQ ID NO:13, CDR-H2 comprising the amino acid sequence of SEQ ID NO:16 and CDR-H3 comprising the amino acid sequence of SEQ ID NO:19,

[0271] (b) a VH domain comprising CDR-H1 comprising the amino acid sequence of SEQ ID NO:2, CDR-H2 comprising the amino acid sequence of SEQ ID NO:4, CDR-H3 comprising the amino acid sequence of SEQ ID NO:7 and a VL domain comprising CDR-L1 comprising the amino acid sequence of SEQ ID NO:13, CDR-H2 comprising the amino acid sequence of SEQ ID NO:16 and CDR-H3 comprising the amino acid sequence of SEQ ID NO:20,

[0272] (c) a VH domain comprising CDR-H1 comprising the amino acid sequence of SEQ ID NO:2, CDR-H2 comprising the amino acid sequence of SEQ ID NO:4, CDR-H3 comprising the amino acid sequence of SEQ ID NO:8 and a VL domain comprising CDR-L1 comprising the amino acid sequence of SEQ ID NO:13, CDR-H2 comprising the amino acid sequence of SEQ ID NO:16 and CDR-H3 comprising the amino acid sequence of SEQ ID NO:21,

[0273] (d) a VH domain comprising CDR-H1 comprising the amino acid sequence of SEQ ID NO:2, CDR-H2 comprising the amino acid sequence of SEQ ID NO:4, CDR-H3 comprising the amino acid sequence of SEQ ID NO:9 and a VL domain comprising CDR-L1 comprising the amino acid sequence of SEQ ID NO:13, CDR-H2 comprising the amino acid sequence of SEQ ID NO:16 and CDR-H3 comprising the amino acid sequence of SEQ ID NO:22,

[0274] (e) a VH domain comprising CDR-H1 comprising the amino acid sequence of SEQ ID NO:3, CDR-H2 comprising the amino acid sequence of SEQ ID NO:5, CDR-H3 comprising the amino acid sequence of SEQ ID NO:10 and a VL domain comprising CDR-L1 comprising the amino acid sequence of SEQ ID NO:14, CDR-H2 comprising the amino acid sequence of SEQ ID NO:17 and CDR-H3 comprising the amino acid sequence of SEQ ID NO:23,

[0275] (f) a VH domain comprising CDR-H1 comprising the amino acid sequence of SEQ ID NO:3, CDR-H2 comprising the amino acid sequence of SEQ ID NO:5, CDR-H3 comprising the amino acid sequence of SEQ ID NO:11 and a VL domain comprising CDR-L1 comprising the amino acid sequence of SEQ ID NO:14, CDR-H2 comprising the amino acid sequence of SEQ ID NO:17 and CDR-H3 comprising the amino acid sequence of SEQ ID NO:23, or

[0276] (g) a VH domain comprising CDR-H1 comprising the amino acid sequence of SEQ ID NO:3, CDR-H2 comprising the amino acid sequence of SEQ ID NO:5, CDR-H3 comprising the amino acid sequence of SEQ ID NO:12 and a VL domain comprising CDR-L1 comprising the amino acid sequence of SEQ ID NO:15, CDR-H2 comprising the amino acid sequence of SEQ ID NO:18 and CDR-H3 comprising the amino acid sequence of SEQ ID NO:24.

[0277] In another aspect, the invention provides a bispecific antigen binding molecule, wherein the moieties capable of specific binding to OX40 comprise a heavy chain variable region VH comprising an amino acid sequence that is at least about 95%, 96%, 97%, 98%, 99% or 100% identical to an amino acid sequence selected from the group consisting of SEQ ID NO:25, SEQ ID NO: 27, SEQ ID NO:29, SEQ ID NO:31, SEQ ID NO:33, SEQ ID NO:35 and SEQ ID NO:37 and a light chain variable region VL comprising an amino acid sequence that is at least about 95%, 96%, 97%, 98%, 99% or 100% identical to an amino acid sequence selected from the group consisting of SEQ ID NO:26, SEQ ID NO: 28, SEQ ID NO:30, SEQ ID NO:30, SEQ ID NO:32, SEQ ID NO:34, SEQ ID NO:36 and SEQ ID NO:38.

[0278] Particularly, provided is a bispecific antigen binding molecule, wherein the moieties capable of specific binding to OX40 comprise
[0279] (i) a heavy chain variable region VH comprising an amino acid sequence of SEQ ID NO:25 and a light chain variable region VL comprising an amino acid sequence of SEQ ID NO:26,
[0280] (ii) a heavy chain variable region VH comprising an amino acid sequence of SEQ ID NO:27 and a light chain variable region VL comprising an amino acid sequence of SEQ ID NO:28,
[0281] (iii) a heavy chain variable region VH comprising an amino acid sequence of SEQ ID NO:29 and a light chain variable region VL comprising an amino acid sequence of SEQ ID NO:30,
[0282] (iv) a heavy chain variable region VH comprising an amino acid sequence of SEQ ID NO:31 and a light chain variable region VL comprising an amino acid sequence of SEQ ID NO:32,
[0283] (v) a heavy chain variable region VH comprising an amino acid sequence of SEQ ID NO:33 and a light chain variable region VL comprising an amino acid sequence of SEQ ID NO:34,
[0284] (vi) a heavy chain variable region VH comprising an amino acid sequence of SEQ ID NO:35 and a light chain variable region VL comprising an amino acid sequence of SEQ ID NO:36, or
[0285] (vii) a heavy chain variable region VH comprising an amino acid sequence of SEQ ID NO:37 and a light chain variable region VL comprising an amino acid sequence of SEQ ID NO:38.

[0286] In a particular aspect, the invention provides a bispecific antigen binding molecule, wherein the moieties capable of specific binding to OX40 comprise a heavy chain variable region VH comprising an amino acid sequence that is at least about 95%, 96%, 97%, 98%, 99% or 100% identical to the amino acid sequence of SEQ ID NO: 27 and a light chain variable region VL comprising an amino acid sequence that is at least about 95%, 96%, 97%, 98%, 99% or 100% identical to the amino acid sequence of SEQ ID NO: 28.

[0287] More particularly, provided is a bispecific antigen binding molecule, wherein the moieties capable of specific binding to OX40 comprise a heavy chain variable region VH comprising an amino acid sequence of SEQ ID NO:27 and a light chain variable region VL comprising an amino acid sequence of SEQ ID NO:28.

[0288] The bispecific antigen binding molecules of the invention are further characterized by comprising at least one moiety capable of specific binding to a target cell antigen. The bispecific antigen binding molecules thus possess the advantage over conventional antibodies capable of specific binding to a costimulatory TNF receptor family member, that they selectively induce a costimulatory T cell response at the target cells, which are typically cancer cells. In one aspect, the target cell antigen is selected from the group consisting of Fibroblast Activation Protein (FAP), Melanoma-associated Chondroitin Sulfate Proteoglycan (MCSP), Epidermal Growth Factor Receptor (EGFR), Carcinoembryonic Antigen (CEA), CD19, CD20 and CD33.

[0289] In a particular aspect, the target cell antigen is Fibroblast Activation Protein (FAP). FAP binding moieties have been described in WO 2012/02006 which is included by reference in its entirety. FAP binding moieties of particular interest are described below.

[0290] In one aspect, the invention provides a bispecific antigen binding molecule, wherein the moiety capable of specific binding to FAP comprises a VH domain comprising
[0291] (i) a CDR-H1 comprising the amino acid sequence selected from the group consisting of SEQ ID NO:39 and SEQ ID NO:40,
[0292] (ii) a CDR-H2 comprising the amino acid sequence selected from the group consisting of SEQ ID NO:41 and SEQ ID NO:42, and
[0293] (iii) a CDR-H3 comprising the amino acid sequence selected from the group consisting of SEQ ID NO:43 and SEQ ID NO:44, and a VL domain comprising
[0294] (iv) a CDR-L1 comprising the amino acid sequence selected from the group consisting of SEQ ID NO:45 and SEQ ID NO:46,
[0295] (v) a CDR-L2 comprising the amino acid sequence selected from the group consisting of SEQ ID NO:47 and SEQ ID NO:48, and
[0296] (vi) a CDR-L3 comprising the amino acid sequence selected from the group consisting of SEQ ID NO:49 and SEQ ID NO:50.

[0297] In particular, provided is a a bispecific antigen binding molecule, wherein the moiety capable of specific binding to FAP comprises

[0298] (a) a VH domain comprising CDR-H1 comprising the amino acid sequence of SEQ ID NO:40, CDR-H2 comprising the amino acid sequence of SEQ ID NO:42, CDR-H3 comprising the amino acid sequence of SEQ ID NO:44 and a VL domain comprising CDR-L1 comprising the amino acid sequence of SEQ ID NO:46, CDR-H2 comprising the amino acid sequence of SEQ ID NO:48 and CDR-H3 comprising the amino acid sequence of SEQ ID NO:50, or

[0299] (b) a VH domain comprising CDR-H1 comprising the amino acid sequence of SEQ ID NO:39, CDR-H2 comprising the amino acid sequence of SEQ ID NO:41, CDR-H3 comprising the amino acid sequence of SEQ ID NO:43 and a VL domain comprising CDR-L1 comprising the amino acid sequence of SEQ ID NO:45, CDR-H2 comprising the amino acid sequence of SEQ ID NO:47 and CDR-H3 comprising the amino acid sequence of SEQ ID NO:49.

[0300] In a further aspect, provided is a bispecific antigen binding molecule, wherein
[0301] (i) the moieties capable of specific binding to OX40 comprise a heavy chain variable region VH comprising an amino acid sequence that is at least about 95%, 96%, 97%, 98%, 99% or 100% identical to the amino acid sequence of SEQ ID NO:25, SEQ ID NO: 27, SEQ ID NO:29, SEQ ID NO:31, SEQ ID NO:33, SEQ ID NO:35 or SEQ ID NO:37 and a light chain variable region comprising an amino acid sequence that is at least about 95%, 96%, 97%, 98%, 99% or 100% identical to the amino acid sequence of SEQ ID NO:26, SEQ ID NO: 28, SEQ ID NO:30, SEQ ID NO:32, SEQ ID NO:34, SEQ ID NO:36 or SEQ ID NO:38 and
[0302] (ii) the moiety capable of specific binding to FAP comprises a heavy chain variable region VH comprising an amino acid sequence that is at least about 95%, 96%, 97%, 98%, 99% or 100% identical to the amino acid sequence of SEQ ID NO:51 or SEQ ID NO:53 and a light chain variable region comprising an amino acid sequence that is at least about 95%, 96%, 97%, 98%, 99% or 100% identical to the amino acid sequence of SEQ ID NO:52 or SEQ ID NO:54.

[0303] In a particular aspect, provided is a bispecific antigen binding molecule, wherein
[0304] (a) the moieties capable of specific binding to OX40 comprise a heavy chain variable region VH comprising an amino acid sequence of SEQ ID NO:25 and a light chain variable region comprising an amino acid sequence of SEQ ID NO:26 and the moiety capable of specific binding to FAP comprises a heavy chain variable region VH comprising an amino acid sequence of SEQ ID NO:51 and a light chain variable region comprising an amino acid sequence of SEQ ID NO:52,
[0305] (b) the moieties capable of specific binding to OX40 comprise a heavy chain variable region VH comprising an amino acid sequence of SEQ ID NO:25 and a light chain variable region comprising an amino acid sequence of SEQ ID NO:26 and the moiety capable of specific binding to FAP comprises a heavy chain variable region VH comprising an amino acid sequence of SEQ ID NO:53 and a light chain variable region comprising an amino acid sequence of SEQ ID NO:54,
[0306] (c) the moieties capable of specific binding to OX40 comprise a heavy chain variable region VH comprising an amino acid sequence of SEQ ID NO:27 and a light chain variable region comprising an amino acid sequence of SEQ ID NO:28 and the moiety capable of specific binding to FAP comprises a heavy chain variable region VH comprising an amino acid sequence of SEQ ID NO:51 and a light chain variable region comprising an amino acid sequence of SEQ ID NO:52,
[0307] (d) the moieties capable of specific binding to OX40 comprise a heavy chain variable region VH comprising an amino acid sequence of SEQ ID NO:27 and a light chain variable region comprising an amino acid sequence of SEQ ID NO:28 and the moiety capable of specific binding to FAP comprises a heavy chain variable region VH comprising an amino acid sequence of SEQ ID NO:53 and a light chain variable region comprising an amino acid sequence of SEQ ID NO:54,
[0308] (e) the moieties capable of specific binding to OX40 comprise a heavy chain variable region VH comprising an amino acid sequence of SEQ ID NO:29 and a light chain variable region comprising an amino acid sequence of SEQ ID NO:30 and the moiety capable of specific binding to FAP comprises a heavy chain variable region VH comprising an amino acid sequence of SEQ ID NO:51 and a light chain variable region comprising an amino acid sequence of SEQ ID NO:52,
[0309] (f) the moieties capable of specific binding to OX40 comprise a heavy chain variable region VH comprising an amino acid sequence of SEQ ID NO:29 and a light chain variable region comprising an amino acid sequence of SEQ ID NO:30 and the moiety capable of specific binding to FAP comprises a heavy chain variable region VH comprising an amino acid sequence of SEQ ID NO:53 and a light chain variable region comprising an amino acid sequence of SEQ ID NO:54,
[0310] (g) the moieties capable of specific binding to OX40 comprise a heavy chain variable region VH comprising an amino acid sequence of SEQ ID NO:31 and a light chain variable region comprising an amino acid sequence of SEQ ID NO:32 and the moiety capable of specific binding to FAP comprises a heavy chain variable region VH comprising an amino acid sequence of SEQ ID NO:51 and a light chain variable region comprising an amino acid sequence of SEQ ID NO:52,
[0311] (h) the moieties capable of specific binding to OX40 comprise a heavy chain variable region VH comprising an amino acid sequence of SEQ ID NO:31 and a light chain variable region comprising an amino acid sequence of SEQ ID NO:32 and the moiety capable of specific binding to FAP comprises a heavy chain variable region VH comprising an amino acid sequence of SEQ ID NO:53 and a light chain variable region comprising an amino acid sequence of SEQ ID NO:54,
[0312] (i) the moieties capable of specific binding to OX40 comprise a heavy chain variable region VH comprising an amino acid sequence of SEQ ID NO:33 and a light chain variable region comprising an amino acid sequence of SEQ ID NO:34 and the moiety capable of specific binding to FAP comprises a heavy chain variable region VH comprising an amino acid sequence of SEQ ID NO:51 and a light chain variable region comprising an amino acid sequence of SEQ ID NO:52,
[0313] (j) the moieties capable of specific binding to OX40 comprise a heavy chain variable region VH comprising an amino acid sequence of SEQ ID NO:33 and a light chain variable region comprising an amino acid sequence of SEQ ID NO:34 and the moiety capable of specific binding to FAP comprises a heavy chain variable region VH comprising an amino acid sequence of SEQ ID NO:53 and a light chain variable region comprising an amino acid sequence of SEQ ID NO:54,
[0314] (k) the moieties capable of specific binding to OX40 comprise a heavy chain variable region VH comprising an amino acid sequence of SEQ ID NO:35 and a light chain variable region comprising an amino acid sequence of SEQ ID NO:36 and the moiety capable of specific binding to FAP comprises a heavy chain variable region VH comprising an amino acid sequence of SEQ ID NO:51 and a light chain variable region comprising an amino acid sequence of SEQ ID NO:52,
[0315] (l) the moieties capable of specific binding to OX40 comprise a heavy chain variable region VH comprising an amino acid sequence of SEQ ID NO:35 and a light chain variable region comprising an amino acid sequence of SEQ ID NO:36 and the moiety capable of specific binding to FAP comprises a heavy chain variable region VH comprising an amino acid sequence of SEQ ID NO:53 and a light chain variable region comprising an amino acid sequence of SEQ ID NO:54,
[0316] (m) the moieties capable of specific binding to OX40 comprise a heavy chain variable region VH comprising an amino acid sequence of SEQ ID NO:37 and a light chain variable region comprising an amino acid sequence of SEQ ID NO:38 and the moiety capable of specific binding to FAP comprises a heavy chain variable region VH comprising an amino acid sequence of SEQ ID NO:51 and a light chain variable region comprising an amino acid sequence of SEQ ID NO:52, or
[0317] (n) the moieties capable of specific binding to OX40 comprise a heavy chain variable region VH comprising an amino acid sequence of SEQ ID NO:37 and a light chain variable region comprising an amino acid sequence of SEQ ID NO:38 and the moiety capable of specific binding to FAP comprises a heavy chain variable region VH comprising an amino acid sequence of SEQ ID NO:53 and a light chain variable region comprising an amino acid sequence of SEQ ID NO:54.

[0318] More particularly, provided is a bispecific antigen binding molecule, wherein the moieties capable of specific binding to OX40 comprise a heavy chain variable region VH comprising an amino acid sequence of SEQ ID NO:27 and a light chain variable region comprising an amino acid sequence of SEQ ID NO:28 and the moiety capable of specific binding to FAP comprises a heavy chain variable region VH comprising an amino acid sequence of SEQ ID NO:51 and a light chain variable region comprising an amino acid sequence of SEQ ID NO:52, or wherein the moieties capable of specific binding to OX40 comprise a heavy chain variable region VH comprising an amino acid sequence of SEQ ID NO:27 and a light chain variable region comprising an amino acid sequence of SEQ ID NO:28 and the moiety capable of specific binding to FAP comprises a heavy chain variable region VH comprising an amino acid sequence of SEQ ID NO:53 and a light chain variable region comprising an amino acid sequence of SEQ ID NO:54.

[0319] In one aspect, the invention provides a bispecific antigen binding molecule, wherein each two of the four moieties capable of specific binding to OX40 are fused to each other. Optionally, they are fused to each other via a peptide linker. In particular, provided is a bispecific antigen binding molecule, wherein each two of the four moieties capable of specific binding to OX40 are fused to each other and at the C-terminus to the N-terminus of one of the subunits of the Fc domain, optionally they are connected at its C-terminus to the N-terminus of one of the subunits of the Fc domain via a peptide linker.

[0320] In a particular aspect, the invention provides a bispecific antigen binding molecule, wherein the molecule comprises two heavy chains and each of the heavy chains comprises variable domains of two moieties capable of specific binding to OX40 and a variable domain of a moiety capable of specific binding to a target cell antigen.

[0321] In another aspect, provided is a bispecific antigen binding molecule as defined herein before, wherein the four moieties capable of specific binding to OX40 are Fab fragments and each two thereof are connected to each other. In a further aspect, the moieties capable of specific binding to OX40 each comprise an antibody light chain variable region (VL) and an antibody heavy chain variable region (VH).

[0322] Bispecific Tetravalent Antigen Binding Molecules Binding to 4-1BB

[0323] In one aspect, the costimulatory TNF receptor family member is 4-1BB (CD137). Particularly, the invention provides bispecific antigen binding molecules, wherein the moiety capable of specific binding to a costimulatory TNF receptor family member binds to a polypeptide comprising the amino acid sequence of SEQ ID NO:239.

[0324] In one aspect, provided is a bispecific antigen binding molecule, comprising four moieties capable of specific binding to 4-1BB, wherein said moieties comprise a VH domain comprising
[0325] (i) a CDR-H1 comprising the amino acid sequence selected from the group consisting of SEQ ID NO:249 and SEQ ID NO:250,
[0326] (ii) a CDR-H2 comprising the amino acid sequence selected from the group consisting of SEQ ID NO:251 and SEQ ID NO:252, and
[0327] (iii) a CDR-H3 comprising the amino acid sequence selected from the group consisting of SEQ ID NO:253, SEQ ID NO:254, SEQ ID NO:255, SEQ ID NO: 256, and SEQ ID NO:257, and a VL domain comprising
[0328] (iv) a CDR-L1 comprising the amino acid sequence selected from the group consisting of SEQ ID NO:258 and SEQ ID NO:259,
[0329] (v) a CDR-L2 comprising the amino acid sequence selected from the group consisting of SEQ ID NO:260 and SEQ ID NO:261, and
[0330] (vi) a CDR-L3 comprising the amino acid sequence selected from the group consisting of SEQ ID NO:262, SEQ ID NO:263, SEQ ID NO:264, SEQ ID NO:265, and SEQ ID NO:266.

[0331] In particular, provided is a bispecific antigen binding molecule, comprising four moieties capable of specific binding to 4-1BB, wherein said moieties comprise

[0332] (a) a VH domain comprising CDR-H1 comprising the amino acid sequence of SEQ ID NO:249, CDR-H2 comprising the amino acid sequence of SEQ ID NO:251, CDR-H3 comprising the amino acid sequence of SEQ ID NO:253 and a VL domain comprising CDR-L1 comprising the amino acid sequence of SEQ ID NO:258, CDR-H2 comprising the amino acid sequence of SEQ ID NO:260 and CDR-H3 comprising the amino acid sequence of SEQ ID NO:262,

[0333] (b) a VH domain comprising CDR-H1 comprising the amino acid sequence of SEQ ID NO:249, CDR-H2 comprising the amino acid sequence of SEQ ID NO:251, CDR-H3 comprising the amino acid sequence of SEQ ID NO:255 and a VL domain comprising CDR-L1 comprising the amino acid sequence of SEQ ID NO:258, CDR-H2 comprising the amino acid sequence of SEQ ID NO:260 and CDR-H3 comprising the amino acid sequence of SEQ ID NO:264,

[0334] (c) a VH domain comprising CDR-H1 comprising the amino acid sequence of SEQ ID NO:249, CDR-H2 comprising the amino acid sequence of SEQ ID NO:251, CDR-H3 comprising the amino acid sequence of SEQ ID NO:256 and a VL domain comprising CDR-L1 comprising the amino acid sequence of SEQ ID NO:258, CDR-H2 comprising the amino acid sequence of SEQ ID NO:260 and CDR-H3 comprising the amino acid sequence of SEQ ID NO:265,

[0335] (d) a VH domain comprising CDR-H1 comprising the amino acid sequence of SEQ ID NO:249, CDR-H2 comprising the amino acid sequence of SEQ ID NO:251, CDR-H3 comprising the amino acid sequence of SEQ ID NO:257 and a VL domain comprising CDR-L1 comprising the amino acid sequence of SEQ ID NO:258, CDR-H2 comprising the amino acid sequence of SEQ ID NO:260 and CDR-H3 comprising the amino acid sequence of SEQ ID NO:266, or

[0336] (e) a VH domain comprising CDR-H1 comprising the amino acid sequence of SEQ ID NO:250, CDR-H2 comprising the amino acid sequence of SEQ ID NO:252, CDR-H3 comprising the amino acid sequence of SEQ ID NO:254 and a VL domain comprising CDR-L1 comprising the amino acid sequence of SEQ ID NO:259, CDR-H2 comprising the amino acid sequence of SEQ ID NO:261 and CDR-H3 comprising the amino acid sequence of SEQ ID NO:263.

[0337] In another aspect, the invention provides a bispecific antigen binding molecule, wherein the moieties capable of specific binding to 4-1BB comprise a heavy chain variable region VH comprising an amino acid sequence that is at least about 95%, 96%, 97%, 98%, 99% or 100% identical to an amino acid sequence selected from the group consisting of SEQ ID NO:267, SEQ ID NO: 269, SEQ ID NO:271, SEQ ID NO:273, and SEQ ID NO:275, and a light chain variable region VL comprising an amino acid sequence that is at least about 95%, 96%, 97%, 98%, 99% or 100% identical to an amino acid sequence selected from the group consisting of SEQ ID NO:268, SEQ ID NO: 270, SEQ ID NO:272, SEQ ID NO:274, and SEQ ID NO:276.

[0338] Particularly, provided is a bispecific antigen binding molecule, wherein the moieties capable of specific binding to 4-1BB comprise
[0339] (i) a heavy chain variable region VH comprising an amino acid sequence of SEQ ID NO:267 and a light chain variable region VL comprising an amino acid sequence of SEQ ID NO:268,
[0340] (ii) a heavy chain variable region VH comprising an amino acid sequence of SEQ ID NO:269 and a light chain variable region VL comprising an amino acid sequence of SEQ ID NO:270,
[0341] (iii) a heavy chain variable region VH comprising an amino acid sequence of SEQ ID NO:271 and a light chain variable region VL comprising an amino acid sequence of SEQ ID NO:272,
[0342] (iv) a heavy chain variable region VH comprising an amino acid sequence of SEQ ID NO:273 and a light chain variable region VL comprising an amino acid sequence of SEQ ID NO:274, or
[0343] (v) a heavy chain variable region VH comprising an amino acid sequence of SEQ ID NO:275 and a light chain variable region VL comprising an amino acid sequence of SEQ ID NO:276.

[0344] In a particular aspect, the invention provides a bispecific antigen binding molecule, wherein the moieties capable of specific binding to 4-1BB comprise a heavy chain variable region VH comprising an amino acid sequence that is at least about 95%, 96%, 97%, 98%, 99% or 100% identical to the amino acid sequence of SEQ ID NO: 267 and a light chain variable region VL comprising an amino acid sequence that is at least about 95%, 96%, 97%, 98%, 99% or 100% identical to the amino acid sequence of SEQ ID NO: 268. More particularly, provided is a bispecific antigen binding molecule, wherein the moieties capable of specific binding to OX40 comprise a heavy chain variable region VH comprising an amino acid sequence of SEQ ID NO:267 and a light chain variable region VL comprising an amino acid sequence of SEQ ID NO:268.

[0345] In another particular aspect, the invention provides a bispecific antigen binding molecule, wherein the moieties capable of specific binding to 4-1BB comprise a heavy chain variable region VH comprising an amino acid sequence that is at least about 95%, 96%, 97%, 98%, 99% or 100% identical to the amino acid sequence of SEQ ID NO: 269 and a light chain variable region VL comprising an amino acid sequence that is at least about 95%, 96%, 97%, 98%, 99% or 100% identical to the amino acid sequence of SEQ ID NO: 270. More particularly, provided is a bispecific antigen binding molecule, wherein the moieties capable of specific binding to OX40 comprise a heavy chain variable region VH comprising an amino acid sequence of SEQ ID NO:269 and a light chain variable region VL comprising an amino acid sequence of SEQ ID NO:270.

[0346] The bispecific antigen binding molecules of the invention are further characterized by comprising at least one moiety capable of specific binding to a target cell antigen. The bispecific antigen binding molecules thus possess the advantage over conventional antibodies capable of specific binding to a costimulatory TNF receptor family member, that they selectively induce a costimulatory T cell response at the target cells, which are typically cancer cells. In one aspect, the target cell antigen is selected from the group consisting of Fibroblast Activation Protein (FAP), Melanoma-associated Chondroitin Sulfate Proteoglycan (MCSP), Epidermal Growth Factor Receptor (EGFR), Carcinoembryonic Antigen (CEA), CD19, CD20 and CD33.

[0347] In a particular aspect, the target cell antigen is Fibroblast Activation Protein (FAP). FAP binding moieties have been described in WO 2012/02006 which is included by reference in its entirety. FAP binding moieties of particular interest are described below.

[0348] In one aspect, the invention provides a bispecific antigen binding molecule, wherein the moiety capable of specific binding to FAP comprises a VH domain comprising
[0349] (i) a CDR-H1 comprising the amino acid sequence selected from the group consisting of SEQ ID NO:39 and SEQ ID NO:40,
[0350] (ii) a CDR-H2 comprising the amino acid sequence selected from the group consisting of SEQ ID NO:41 and SEQ ID NO:42, and
[0351] (iii) a CDR-H3 comprising the amino acid sequence selected from the group consisting of SEQ ID NO:43 and SEQ ID NO:44, and a VL domain comprising
[0352] (iv) a CDR-L1 comprising the amino acid sequence selected from the group consisting of SEQ ID NO:45 and SEQ ID NO:46,
[0353] (v) a CDR-L2 comprising the amino acid sequence selected from the group consisting of SEQ ID NO:47 and SEQ ID NO:48, and
[0354] (vi) a CDR-L3 comprising the amino acid sequence selected from the group consisting of SEQ ID NO:49 and SEQ ID NO:50.

[0355] In particular, provided is a a bispecific antigen binding molecule, wherein the moiety capable of specific binding to FAP comprises

[0356] (a) a VH domain comprising CDR-H1 comprising the amino acid sequence of SEQ ID NO:40, CDR-H2 comprising the amino acid sequence of SEQ ID NO:42, CDR-H3 comprising the amino acid sequence of SEQ ID NO:44 and a VL domain comprising CDR-L1 comprising the amino acid sequence of SEQ ID NO:46, CDR-H2 comprising the amino acid sequence of SEQ ID NO:48 and CDR-H3 comprising the amino acid sequence of SEQ ID NO:50, or

[0357] (b) a VH domain comprising CDR-H1 comprising the amino acid sequence of SEQ ID NO:39, CDR-H2 comprising the amino acid sequence of SEQ ID NO:41, CDR-H3 comprising the amino acid sequence of SEQ ID NO:43 and a VL domain comprising CDR-L1 comprising the amino acid sequence of SEQ ID NO:45, CDR-H2 comprising the amino acid sequence of SEQ ID NO:47 and CDR-H3 comprising the amino acid sequence of SEQ ID NO:49.

[0358] In a further aspect, provided is a bispecific antigen binding molecule, wherein
[0359] (i) each of the moieties capable of specific binding to 4-1BB comprises a heavy chain variable region VH comprising an amino acid sequence that is at least about 95%, 96%, 97%, 98%, 99% or 100% identical to the amino acid sequence selected from the group consisting of SEQ ID NO:267, SEQ ID NO: 269, SEQ ID NO:271, SEQ ID NO:273, and SEQ ID NO:275 and a light chain variable region comprising an amino acid sequence that is at least about 95%, 96%, 97%, 98%, 99% or 100% identical to an amino acid sequence selected from the group consisting of SEQ ID NO:268, SEQ ID NO: 270, SEQ ID NO:272, SEQ ID NO:274, and SEQ ID NO:276, and
[0360] (ii) the moiety capable of specific binding to FAP comprises a heavy chain variable region VH comprising an amino acid sequence that is at least about 95%, 96%, 97%, 98%, 99% or 100% identical to the amino acid sequence of SEQ ID NO:51 or SEQ ID NO:53 and a light chain variable region comprising an amino acid sequence that is at least about 95%, 96%, 97%, 98%, 99% or 100% identical to the amino acid sequence of SEQ ID NO:52 or SEQ ID NO:54.

[0361] In a particular aspect, provided is a bispecific antigen binding molecule, wherein
[0362] (a) the moieties capable of specific binding to 4-1BB comprise a heavy chain variable region VH comprising an amino acid sequence of SEQ ID NO:267 and a light chain variable region comprising an amino acid sequence of SEQ ID NO:268 and the moiety capable of specific binding to FAP comprises a heavy chain variable region VH comprising an amino acid sequence of SEQ ID NO:51 and a light chain variable region comprising an amino acid sequence of SEQ ID NO:52,
[0363] (b) the moieties capable of specific binding to 4-1BB comprise a heavy chain variable region VH comprising an amino acid sequence of SEQ ID NO:267 and a light chain variable region comprising an amino acid sequence of SEQ ID NO:268 and the moiety capable of specific binding to FAP comprises a heavy chain variable region VH comprising an amino acid sequence of SEQ ID NO:53 and a light chain variable region comprising an amino acid sequence of SEQ ID NO:54,
[0364] (c) the moieties capable of specific binding to 4-1BB comprise a heavy chain variable region VH comprising an amino acid sequence of SEQ ID NO:269 and a light chain variable region comprising an amino acid sequence of SEQ ID NO:270 and the moiety capable of specific binding to FAP comprises a heavy chain variable region VH comprising an amino acid sequence of SEQ ID NO:51 and a light chain variable region comprising an amino acid sequence of SEQ ID NO:52,
[0365] (d) the moieties capable of specific binding to 4-1BB comprise a heavy chain variable region VH comprising an amino acid sequence of SEQ ID NO:269 and a light chain variable region comprising an amino acid sequence of SEQ ID NO:270 and the moiety capable of specific binding to FAP comprises a heavy chain variable region VH comprising an amino acid sequence of SEQ ID NO:53 and a light chain variable region comprising an amino acid sequence of SEQ ID NO:54,
[0366] (e) the moieties capable of specific binding to 4-1BB comprise a heavy chain variable region VH comprising an amino acid sequence of SEQ ID NO:271 and a light chain variable region comprising an amino acid sequence of SEQ ID NO:272 and the moiety capable of specific binding to FAP comprises a heavy chain variable region VH comprising an amino acid sequence of SEQ ID NO:51 and a light chain variable region comprising an amino acid sequence of SEQ ID NO:52,
[0367] (f) the moieties capable of specific binding to 4-1BB comprise a heavy chain variable region VH comprising an amino acid sequence of SEQ ID NO:271 and a light chain variable region comprising an amino acid sequence of SEQ ID NO:272 and the moiety capable of specific binding to FAP comprises a heavy chain variable region VH comprising an amino acid sequence of SEQ ID NO:53 and a light chain variable region comprising an amino acid sequence of SEQ ID NO:54,
[0368] (g) the moieties capable of specific binding to 4-1BB comprise a heavy chain variable region VH comprising an amino acid sequence of SEQ ID NO:273 and a light chain variable region comprising an amino acid sequence of SEQ ID NO:274 and the moiety capable of specific binding to FAP comprises a heavy chain variable region VH comprising an amino acid sequence of SEQ ID NO:51 and a light chain variable region comprising an amino acid sequence of SEQ ID NO:52,
[0369] (h) the moieties capable of specific binding to 4-1BB comprise a heavy chain variable region VH comprising an amino acid sequence of SEQ ID NO:273 and a light chain variable region comprising an amino acid sequence of SEQ ID NO:274 and the moiety capable of specific binding to FAP comprises a heavy chain variable region VH comprising an amino acid sequence of SEQ ID NO:53 and a light chain variable region comprising an amino acid sequence of SEQ ID NO:54,
[0370] (i) the moieties capable of specific binding to 4-1BB comprise a heavy chain variable region VH comprising an amino acid sequence of SEQ ID NO:275 and a light chain variable region comprising an amino acid sequence of SEQ ID NO:276 and the moiety capable of specific binding to FAP comprises a heavy chain variable region VH comprising an amino acid sequence of SEQ ID NO:51 and a light chain variable region comprising an amino acid sequence of SEQ ID NO:52, or
[0371] (j) the moieties capable of specific binding to 4-1BB comprise a heavy chain variable region VH comprising an amino acid sequence of SEQ ID NO:275 and a light chain variable region comprising an amino acid sequence of SEQ ID NO:276 and the moiety capable of specific binding to FAP comprises a heavy chain variable region VH comprising an amino acid sequence of SEQ ID NO:53 and a light chain variable region comprising an amino acid sequence of SEQ ID NO:54.

[0372] In one aspect, the invention provides a bispecific antigen binding molecule, wherein each two of the four moieties capable of specific binding to 4-1BB are fused to each other. Optionally, they are fused to each other via a peptide linker. In particular, provided is a bispecific antigen binding molecule, wherein each two of the four moieties capable of specific binding to OX40 are fused to each other and at the C-terminus to the N-terminus of one of the subunits of the Fc domain, optionally they are connected at its C-terminus to the N-terminus of one of the subunits of the Fc domain via a peptide linker.

[0373] In a particular aspect, the invention provides a bispecific antigen binding molecule, wherein the molecule comprises two heavy chains and each of the heavy chains comprises variable domains of two moieties capable of specific binding to 4-1BB and a variable domain of a moiety capable of specific binding to a target cell antigen.

[0374] In another aspect, provided is a bispecific antigen binding molecule as defined herein before, wherein the four moieties capable of specific binding to 4-1BB are Fab fragments and each two thereof are connected to each other. In a further aspect, the moieties capable of specific binding to OX40 each comprise an antibody light chain variable region (VL) and an antibody heavy chain variable region (VH).

[0375] Bispecific Tetravalent Antigen Binding Molecules Binding to GITR

[0376] In one aspect, the costimulatory TNF receptor family member is GITR. Particularly, the invention provides bispecific antigen binding molecules, wherein the moiety capable of specific binding to a costimulatory TNF receptor family member binds to a polypeptide comprising the amino acid sequence of SEQ ID NO:357.

[0377] In one aspect, provided is a bispecific antigen binding molecule, comprising four moieties capable of specific binding to GITR, wherein said moieties comprise a VH domain comprising a CDR-H1 comprising the amino acid sequence of SEQ ID NO:371, a CDR-H2 comprising the amino acid sequence of SEQ ID NO:372 and a CDR-H3 comprising the amino acid sequence of SEQ ID NO:373, and a VL domain comprising a CDR-L1 comprising the amino acid sequence of SEQ ID NO:374, a CDR-L2 comprising the amino acid sequence of SEQ ID NO:375 and a CDR-L3 comprising the amino acid sequence of SEQ ID NO:376.

[0378] In another aspect, the invention provides a bispecific antigen binding molecule, wherein each of the moieties capable of specific binding to GITR comprises a heavy chain variable region VH comprising an amino acid sequence that is at least about 95%, 96%, 97%, 98%, 99% or 100% identical to an amino acid sequence of SEQ ID NO:383, and a light chain variable region VL comprising an amino acid sequence that is at least about 95%, 96%, 97%, 98%, 99% or 100% identical to an amino acid sequence of SEQ ID NO:384.

[0379] Particularly, provided is a bispecific antigen binding molecule, wherein the moieties capable of specific binding to GITR comprise a heavy chain variable region VH comprising an amino acid sequence of SEQ ID NO:383 and a light chain variable region VL comprising an amino acid sequence of SEQ ID NO:384.

[0380] In a further aspect, provided is a bispecific antigen binding molecule, comprising four moieties capable of specific binding to GITR, wherein said moieties comprise a VH domain comprising a CDR-H1 comprising the amino acid sequence of SEQ ID NO:377, a CDR-H2 comprising the amino acid sequence of SEQ ID NO:378 and a CDR-H3 comprising the amino acid sequence of SEQ ID NO:379, and a VL domain comprising a CDR-L1 comprising the amino acid sequence of SEQ ID NO:380, a CDR-L2 comprising the amino acid sequence of SEQ ID NO:381 and a CDR-L3 comprising the amino acid sequence of SEQ ID NO:381.

[0381] In another aspect, the invention provides a bispecific antigen binding molecule, wherein each of the moieties capable of specific binding to GITR comprises a heavy chain variable region VH comprising an amino acid sequence that is at least about 95%, 96%, 97%, 98%, 99% or 100% identical to an amino acid sequence of SEQ ID NO:385, and a light chain variable region VL comprising an amino acid sequence that is at least about 95%, 96%, 97%, 98%, 99% or 100% identical to an amino acid sequence of SEQ ID NO:386.

[0382] Particularly, provided is a bispecific antigen binding molecule, wherein the moieties capable of specific binding to GITR comprise a heavy chain variable region VH comprising an amino acid sequence of SEQ ID NO:385 and a light chain variable region VL comprising an amino acid sequence of SEQ ID NO:386.

[0383] The bispecific antigen binding molecules of the invention are further characterized by comprising at least one moiety capable of specific binding to a target cell antigen. The bispecific antigen binding molecules thus possess the advantage over conventional antibodies capable of specific binding to a costimulatory TNF receptor family member, that they selectively induce a costimulatory T cell response at the target cells, which are typically cancer cells. In one aspect, the target cell antigen is selected from the group consisting of Fibroblast Activation Protein (FAP), Melanoma-associated Chondroitin Sulfate Proteoglycan (MCSP), Epidermal Growth Factor Receptor (EGFR), Carcinoembryonic Antigen (CEA), CD19, CD20 and CD33.

[0384] In a particular aspect, the target cell antigen is Fibroblast Activation Protein (FAP). FAP binding moieties have been described in WO 2012/02006 which is included by reference in its entirety. FAP binding moieties of particular interest are described below.

[0385] In one aspect, the invention provides a bispecific antigen binding molecule, wherein the moiety capable of specific binding to FAP comprises a VH domain comprising
[0386] (i) a CDR-H1 comprising the amino acid sequence selected from the group consisting of SEQ ID NO:39 and SEQ ID NO:40,
[0387] (ii) a CDR-H2 comprising the amino acid sequence selected from the group consisting of SEQ ID NO:41 and SEQ ID NO:42, and
[0388] (iii) a CDR-H3 comprising the amino acid sequence selected from the group consisting of SEQ ID NO:43 and SEQ ID NO:44,
   and a VL domain comprising
[0389] (iv) a CDR-L1 comprising the amino acid sequence selected from the group consisting of SEQ ID NO:45 and SEQ ID NO:46,
[0390] (v) a CDR-L2 comprising the amino acid sequence selected from the group consisting of SEQ ID NO:47 and SEQ ID NO:48, and
[0391] (vi) a CDR-L3 comprising the amino acid sequence selected from the group consisting of SEQ ID NO:49 and SEQ ID NO:50.

[0392] In particular, provided is a a bispecific antigen binding molecule, wherein the moiety capable of specific binding to FAP comprises

[0393] (a) a VH domain comprising CDR-H1 comprising the amino acid sequence of SEQ ID NO:40, CDR-H2 comprising the amino acid sequence of SEQ ID NO:42, CDR-H3 comprising the amino acid sequence of SEQ ID NO:44 and a VL domain comprising CDR-L1 comprising the amino acid sequence of SEQ ID NO:46, CDR-H2 comprising the amino acid sequence of SEQ ID NO:48 and CDR-H3 comprising the amino acid sequence of SEQ ID NO:50, or

[0394] (b) a VH domain comprising CDR-H1 comprising the amino acid sequence of SEQ ID NO:39, CDR-H2 comprising the amino acid sequence of SEQ ID NO:41, CDR-H3 comprising the amino acid sequence of SEQ ID NO:43 and a VL domain comprising CDR-L1 comprising the amino acid sequence of SEQ ID NO:45, CDR-H2 comprising the amino acid sequence of SEQ ID NO:47 and CDR-H3 comprising the amino acid sequence of SEQ ID NO:49.

[0395] In a further aspect, provided is a bispecific antigen binding molecule, wherein
[0396] (i) each of the moieties capable of specific binding to GITR comprises a heavy chain variable region VH comprising an amino acid sequence that is at least about 95%, 96%, 97%, 98%, 99% or 100% identical to the amino acid sequence of SEQ ID NO:383 and a light chain variable region comprising an amino acid sequence that is at least about 95%, 96%, 97%, 98%, 99% or 100% identical to an amino acid sequence of SEQ ID NO:384, and
[0397] (ii) the moiety capable of specific binding to FAP comprises a heavy chain variable region VH comprising an amino acid sequence that is at least about 95%, 96%, 97%, 98%, 99% or 100% identical to the amino acid sequence of SEQ ID NO:51 or SEQ ID NO:53 and a light chain variable region comprising an amino acid sequence that is at least about 95%, 96%, 97%, 98%, 99% or 100% identical to the amino acid sequence of SEQ ID NO:52 or SEQ ID NO:54.

[0398] In a particular aspect, provided is a bispecific antigen binding molecule, wherein
[0399] (a) the moieties capable of specific binding to GITR comprise a heavy chain variable region VH comprising an amino acid sequence of SEQ ID NO:383 and a light chain variable region comprising an amino acid sequence of SEQ ID NO:384 and the moiety capable of specific binding to FAP comprises a heavy chain variable region VH comprising an amino acid sequence of SEQ ID NO:51 and a light chain variable region comprising an amino acid sequence of SEQ ID NO:52, or
[0400] (b) the moieties capable of specific binding to 4-1BB comprise a heavy chain variable region VH comprising an amino acid sequence of SEQ ID NO:383 and a light chain variable region comprising an amino acid sequence of SEQ ID NO:384 and the moiety capable of specific binding to FAP comprises a heavy chain variable region VH comprising an amino acid sequence of SEQ ID NO:53 and a light chain variable region comprising an amino acid sequence of SEQ ID NO:54.

[0401] In a further aspect, provided is a bispecific antigen binding molecule, wherein
[0402] (i) each of the moieties capable of specific binding to GITR comprises a heavy chain variable region VH comprising an amino acid sequence that is at least about 95%, 96%, 97%, 98%, 99% or 100% identical to the amino acid sequence of SEQ ID NO:385 and a light chain variable region comprising an amino acid sequence that is at least about 95%, 96%, 97%, 98%, 99% or 100% identical to an amino acid sequence of SEQ ID NO:386, and
[0403] (ii) the moiety capable of specific binding to FAP comprises a heavy chain variable region VH comprising an amino acid sequence that is at least about 95%, 96%, 97%, 98%, 99% or 100% identical to the amino acid sequence of SEQ ID NO:51 or SEQ ID NO:53 and a light chain variable region comprising an amino acid sequence that is at least about 95%, 96%, 97%, 98%, 99% or 100% identical to the amino acid sequence of SEQ ID NO:52 or SEQ ID NO:54.

[0404] In a particular aspect, provided is a bispecific antigen binding molecule, wherein
[0405] (a) the moieties capable of specific binding to GITR comprise a heavy chain variable region VH comprising an amino acid sequence of SEQ ID NO:385 and a light chain variable region comprising an amino acid sequence of SEQ ID NO:386 and the moiety capable of specific binding to FAP comprises a heavy chain variable region VH comprising an amino acid sequence of SEQ ID NO:51 and a light chain variable region comprising an amino acid sequence of SEQ ID NO:52, or
[0406] (b) the moieties capable of specific binding to 4-1BB comprise a heavy chain variable region VH comprising an amino acid sequence of SEQ ID NO:385 and a light chain variable region comprising an amino acid sequence of SEQ ID NO:386 and the moiety capable of specific binding to FAP comprises a heavy chain variable region VH comprising an amino acid sequence of SEQ ID NO:53 and a light chain variable region comprising an amino acid sequence of SEQ ID NO:54.

[0407] In one aspect, the invention provides a bispecific antigen binding molecule, wherein each two of the four moieties capable of specific binding to GITR are fused to each other. Optionally, they are fused to each other via a peptide linker. In particular, provided is a bispecific antigen binding molecule, wherein each two of the four moieties capable of specific binding to OX40 are fused to each other and at the C-terminus to the N-terminus of one of the subunits of the Fc domain, optionally they are connected at its C-terminus to the N-terminus of one of the subunits of the Fc domain via a peptide linker.

[0408] In a particular aspect, the invention provides a bispecific antigen binding molecule, wherein the molecule comprises two heavy chains and each of the heavy chains comprises variable domains of two moieties capable of specific binding to GITR and a variable domain of a moiety capable of specific binding to a target cell antigen.

[0409] In another aspect, provided is a bispecific antigen binding molecule as defined herein before, wherein the four moieties capable of specific binding to GITR are Fab fragments and each two thereof are connected to each other. In a further aspect, the moieties capable of specific binding to OX40 each comprise an antibody light chain variable region (VL) and an antibody heavy chain variable region (VH).

[0410] In a further aspect, the invention provides a bispecific antigen binding molecule, wherein each two of the four moieties capable of specific binding to a costimulatory TNF receptor family member are fused to each other. Optionally, they are fused to each other via a peptide linker. In particular, provided is a bispecific antigen binding molecule, wherein each two of the four moieties capable of specific binding to a costimulatory TNF receptor family member are further fused at its C-terminus to the N-terminus of one of the subunits of the Fc domain, optionally they are connected at its C-terminus to the N-terminus of one of the subunits of the Fc domain via a peptide linker.

[0411] In a particular aspect, the invention provides a bispecific antigen binding molecule, wherein the molecule comprises two heavy chains and each of the heavy chains comprises variable domains of two moieties capable of specific binding to a costimulatory TNF receptor family member and a variable domain of a moiety capable of specific binding to a target cell antigen. Thus, the invention provides a bispecific antigen binding molecule as defined herein before, wherein the four moieties capable of specific binding to a costimulatory TNF receptor family member are Fab fragments and each two thereof are connected to each other.

[0412] In a further aspect, provided is a bispecific antigen binding molecule as described herein before, wherein a first Fab fragment capable of specific binding to a costimulatory TNF receptor family member is fused at the C-terminus of the CH1 domain to the VH domain of a second Fab fragment capable of specific binding to a costimulatory TNF receptor family member and a third Fab fragment capable of specific binding to a costimulatory TNF receptor family member is fused at the C-terminus of the CH1 domain to the VH domain of a fourth Fab fragment capable of specific binding to a costimulatory TNF receptor family member, optionally via a peptide linker.

[0413] Tetravalent, Bispecific Antigen Binding Molecules with Monovalency for the Target Cell Antigen (4+1 Format)

[0414] In one aspect, the invention relates to bispecific antigen binding molecules, wherein the bispecific antigen binding molecule is tetravalent for the costimulatory TNF receptor family member and monovalent for the target cell antigen. Thus, the invention relates to bispecific antigen binding molecules comprising (a) four moieties capable of specific binding to a costimulatory TNF receptor family member, (b) one moiety capable of specific binding to a target cell antigen, and (c) a Fc domain composed of a first and a second subunit capable of stable association.

[0415] In a particular aspect, provided is a bispecific antigen binding molecule, wherein said molecule comprises

[0416] (a) four moieties capable of specific binding to a costimulatory TNF receptor family member,

[0417] (b) a VH and VL domain capable of specific binding to a target cell antigen, and

[0418] (c) a Fc domain composed of a first and a second subunit capable of stable association.

[0419] In a particular aspect, provided is a bispecific antigen binding molecule, wherein said molecule comprises
[0420] (a) four Fab fragments capable of specific binding to a costimulatory TNF receptor family member,
[0421] (b) a VH and VL domain capable of specific binding to a target cell antigen, and
[0422] (c) a Fc domain composed of a first and a second subunit capable of stable association.

[0423] In one aspect, provided is a bispecific antigen binding molecule, wherein the moiety capable of specific binding to a target cell antigen comprises a VH and VL domain and wherein the VH domain is connected via a peptide linker to the C-terminus of the first subunit of the Fc domain and the VL domain is connected via a peptide linker to the C-terminus of the second subunit of the Fc domain. In a particular aspect, the peptide linker is (G4S)₄.

[0424] In one aspect, the invention relates to a bispecific antigen binding molecule comprising (a) four moieties capable of specific binding to a costimulatory TNF receptor family member, (b) a VH and VL domain capable of specific binding to a target cell antigen, and (c) a Fc domain composed of a first and a second subunit capable of stable association, wherein the first subunit of the Fc domain comprises knobs and the second subunit of the Fc domain comprises holes according to the knobs into holes method, and wherein the VH domain capable of specific binding to a target cell antigen is connected via a peptide linker to the C-terminus of the first subunit of the Fc domain comprising knobs and wherein the VL domain capable of specific binding to a target cell antigen is connected via a peptide linker to the C-terminus of the second subunit of the Fc domain comprising holes.

[0425] In another aspect, the invention relates to a bispecific antigen binding molecule comprising (a) four moieties capable of specific binding to a costimulatory TNF receptor family member, (b) a VH and VL domain capable of specific binding to a target cell antigen, and (c) a Fc domain composed of a first and a second subunit capable of stable association, wherein the first subunit of the Fc domain comprises knobs and the second subunit of the Fc domain comprises holes according to the knobs into holes method, and wherein the VL domain capable of specific binding to a target cell antigen is connected via a peptide linker to the C-terminus of the first subunit of the Fc domain comprising knobs and wherein the VH domain capable of specific binding to a target cell antigen is connected via a peptide linker to the C-terminus of the second subunit of the Fc domain comprising holes.

[0426] In one aspect, provided is a bispecific antigen binding molecule, wherein said molecule comprises

[0427] (a) four Fab fragments capable of specific binding to OX40,

[0428] (b) a VH and VL domain capable of specific binding to FAP, and

[0429] (c) a Fc domain composed of a first and a second subunit capable of stable association.

[0430] In a specific aspect, provided is a bispecific antigen binding molecule of the invention, wherein said antigen binding molecule comprises

[0431] (i) a first heavy chain comprising an amino acid sequence of SEQ ID NO:213, a second heavy chain comprising an amino acid sequence of SEQ ID NO:214, and a light chain comprising an amino acid sequence of SEQ ID NO:157, or

[0432] (ii) a first heavy chain comprising an amino acid sequence of SEQ ID NO:217, a second heavy chain comprising an amino acid sequence of SEQ ID NO:218, and a light chain comprising an amino acid sequence of SEQ ID NO:157.

[0433] In a further specific aspect, provided is a bispecific antigen binding molecule of the invention, wherein said antigen binding molecule comprises a first heavy chain comprising an amino acid sequence of SEQ ID NO:233, a second heavy chain comprising an amino acid sequence of SEQ ID NO:234, and a light chain comprising an amino acid sequence of SEQ ID NO:157.

[0434] In another specific aspect, provided is a bispecific antigen binding molecule of the invention, wherein said antigen binding molecule comprises a first heavy chain comprising an amino acid sequence of SEQ ID NO:237, a second heavy chain comprising an amino acid sequence of SEQ ID NO:238, and a light chain comprising an amino acid sequence of SEQ ID NO:157.

[0435] In a further aspect, provided is a bispecific antigen binding molecule, wherein said molecule comprises

[0436] (a) four Fab fragments capable of specific binding to 4-1BB,

[0437] (b) a VH and VL domain capable of specific binding to FAP, and

[0438] (c) a Fc domain composed of a first and a second subunit capable of stable association.

[0439] In a specific aspect, provided is a bispecific antigen binding molecule of the invention, wherein said antigen binding molecule comprises

[0440] (i) a first heavy chain comprising an amino acid sequence of SEQ ID NO:327, a second heavy chain comprising an amino acid sequence of SEQ ID NO:328, and a light chain comprising an amino acid sequence of SEQ ID NO.289,

[0441] (ii) a first heavy chain comprising an amino acid sequence of SEQ ID NO:331, a second heavy chain comprising an amino acid sequence of SEQ ID NO:332, and a light chain comprising an amino acid sequence of SEQ ID NO:293,

[0442] (iii) a first heavy chain comprising an amino acid sequence of SEQ ID NO:335, a second heavy chain comprising an amino acid sequence of SEQ ID NO:336, and a light chain comprising an amino acid sequence of SEQ ID NO:297, or

[0443] (iv) a first heavy chain comprising an amino acid sequence of SEQ ID NO:339, a second heavy chain comprising an amino acid sequence of SEQ ID NO:340, and a light chain comprising an amino acid sequence of SEQ ID NO:301.

[0444] In a further specific aspect, provided is a bispecific antigen binding molecule of the invention, wherein said antigen binding molecule comprises

[0445] (i) a first heavy chain comprising an amino acid sequence of SEQ ID NO:343, a second heavy chain comprising an amino acid sequence of SEQ ID NO:344, and a light chain comprising an amino acid sequence of SEQ ID NO.289,

[0446] (ii) a first heavy chain comprising an amino acid sequence of SEQ ID NO:347, a second heavy chain comprising an amino acid sequence of SEQ ID NO:348, and a light chain comprising an amino acid sequence of SEQ ID NO:293,

[0447] (iii) a first heavy chain comprising an amino acid sequence of SEQ ID NO:351, a second heavy chain comprising an amino acid sequence of SEQ ID NO:352, and a light chain comprising an amino acid sequence of SEQ ID NO:297, or

[0448] (iv) a first heavy chain comprising an amino acid sequence of SEQ ID NO:355, a second heavy chain comprising an amino acid sequence of SEQ ID NO:356, and a light chain comprising an amino acid sequence of SEQ ID NO:301.

[0449] In a further aspect, provided is a bispecific antigen binding molecule, wherein said molecule comprises

[0450] (a) four Fab fragments capable of specific binding to GITR,

[0451] (b) a VH and VL domain capable of specific binding to FAP, and

[0452] (c) a Fc domain composed of a first and a second subunit capable of stable association.

[0453] In a specific aspect, provided is a bispecific antigen binding molecule of the invention, wherein said antigen binding molecule comprises a first heavy chain comprising an amino acid sequence of SEQ ID NO:401, a second heavy chain comprising an amino acid sequence of SEQ ID NO:402, and a light chain comprising an amino acid sequence of SEQ ID NO:393.

[0454] In another aspect, provided is a bispecific antigen binding molecule of the invention, wherein said antigen binding molecule comprises a first heavy chain comprising an amino acid sequence of SEQ ID NO:405, a second heavy chain comprising an amino acid sequence of SEQ ID NO:406, and a light chain comprising an amino acid sequence of SEQ ID NO:397.

[0455] Tetravalent, Bispecific Antigen Binding Molecules with Bivalency for the Target Cell Antigen (4+2 Format)

[0456] In another aspect, the invention relates to a bispecific antigen binding molecule, comprising

(a) four moieties capable of specific binding to a costimulatory TNF receptor family member,
(b) two moieties capable of specific binding to a target cell antigen, and
(c) a Fc domain composed of a first and a second subunit capable of stable association.

[0457] In one aspect, the invention relates to a bispecific antigen binding molecule, wherein the bispecific antigen binding molecule is tetravalent for the costimulatory TNF receptor family member and bivalent for the target cell antigen.

[0458] In one aspect, provided is a bispecific antigen binding molecule, wherein the two moieties capable of specific binding to a target cell antigen are Fab fragments or crossover Fab fragments.

[0459] In a further aspect, provided is a bispecific antigen binding molecule, wherein each of the Fab fragments or crossover Fab fragments capable of specific binding to a target cell antigen is fused at the N-terminus of the VH or VL domain via a peptide linker to the C-terminus of one of the subunits of the Fc domain. In a particular aspect, the peptide linker is (G4S)₄.

[0460] In a particular aspect, provided is a bispecific antigen binding molecule, wherein the two moieties capable of specific binding to a target cell antigen are VH-VL crossover Fab fragments and are each fused at the N-terminus of the VL domain via a peptide linker to the C-terminus of one of the subunits of the Fc domain.

[0461] In another aspect, provided is a bispecific antigen binding molecule, wherein the two moieties capable of specific binding to a target cell antigen are CH-CL crossover Fab fragments and are each fused at the N-terminus of the VH domain via a peptide linker to the C-terminus of one of the subunits of the Fc domain.

[0462] In a specific aspect, the invention relates to a bispecific antigen binding molecule, comprising

(a) four Fab fragments capable of specific binding to OX40,
(b) two moieties capable of specific binding to FAP, and
(c) a Fc domain composed of a first and a second subunit capable of stable association.

[0463] More particularly, provided is a bispecific antigen binding molecule, wherein said antigen binding molecule comprises (i) a heavy chain comprising an amino acid sequence of SEQ ID NO:227, a first light chain of SEQ ID NO:226 and a second light chain of SEQ ID NO:228.

[0464] In a specific aspect, the invention relates to a bispecific antigen binding molecule, comprising

(a) four Fab fragments capable of specific binding to GITR,
(b) two moieties capable of specific binding to FAP, and
(c) a Fc domain composed of a first and a second subunit capable of stable association.

[0465] More particularly, provided is a bispecific antigen binding molecule, wherein said antigen binding molecule comprises (i) a heavy chain comprising an amino acid sequence of SEQ ID NO:409, a first light chain of SEQ ID NO:393 and a second light chain of SEQ ID NO:410.

[0466] In another aspect, provided is a bispecific antigen binding molecule, wherein said antigen binding molecule comprises (i) a heavy chain comprising an amino acid sequence of SEQ ID NO:412, a first light chain of SEQ ID NO:397 and a second light chain of SEQ ID NO:410.

[0467] Fc Domain Modifications Reducing Fc Receptor Binding and/or Effector Function

[0468] The bispecific antigen binding molecules of the invention further comprise a Fc domain composed of a first and a second subunit capable of stable association.

[0469] In certain aspects, one or more amino acid modifications may be introduced into the Fc region of an antibody provided herein, thereby generating an Fc region variant. The Fc region variant may comprise a human Fc region sequence (e.g., a human IgG1, IgG2, IgG3 or IgG4 Fc region) comprising an amino acid modification (e.g. a substitution) at one or more amino acid positions.

[0470] The Fc domain confers favorable pharmacokinetic properties to the bispecific antibodies of the invention, including a long serum half-life which contributes to good accumulation in the target tissue and a favorable tissue-blood distribution ratio. At the same time it may, however, lead to undesirable targeting of the bispecific antibodies of the invention to cells expressing Fc receptors rather than to the preferred antigen-bearing cells. Accordingly, in particular embodiments the Fc domain of the bispecific antibodies of the invention exhibits reduced binding affinity to an Fc receptor and/or reduced effector function, as compared to a native IgG Fc domain, in particular an IgG1 Fc domain or an IgG4 Fc domain. More particularly, the Fc domain is an IgG1 FC domain.

[0471] In one such aspect the Fc domain (or the bispecific antigen binding molecule of the invention comprising said Fc domain) exhibits less than 50%, preferably less than 20%, more preferably less than 10% and most preferably less than 5% of the binding affinity to an Fc receptor, as compared to a native IgG1 Fc domain (or the bispecific antigen binding molecule of the invention comprising a native IgG1 Fc domain), and/or less than 50%, preferably less than 20%, more preferably less than 10% and most preferably less than 5% of the effector function, as compared to a native IgG1 Fc domain (or the bispecific antigen binding molecule of the invention comprising a native IgG1 Fc domain). In one aspect, the Fc domain (or the bispecific antigen binding molecule of the invention comprising said Fc domain) does not substantially bind to an Fc receptor and/or induce effector function. In a particular aspect the Fc receptor is an Fcγ receptor. In one aspect, the Fc receptor is a human Fc receptor. In one aspect, the Fc receptor is an activating Fc receptor. In a specific aspect, the Fc receptor is an activating human Fcγ receptor, more specifically human FcγRIIIa, FcγRI or FcγRIIa, most specifically human FcγRIIIa. In one aspect, the Fc receptor is an inhibitory Fc receptor. In a specific aspect, the Fc receptor is an inhibitory human Fcγ receptor, more specifically human FcγRIIB. In one aspect the effector function is one or more of CDC, ADCC, ADCP, and cytokine secretion. In a particular aspect, the effector function is ADCC. In one aspect, the Fc domain exhibits substantially similar binding affinity to neonatal Fc receptor (FcRn), as compared to a native IgG1 Fc domain. Substantially similar binding to FcRn is achieved when the Fc domain (or the bispecific antigen binding molecule of the invention comprising said Fc domain) exhibits greater than about 70%, particularly greater than about 80%, more particularly greater than about 90% of the binding affinity of a native IgG1 Fc domain (or the bispecific antigen binding molecule of the invention comprising a native IgG1 Fc domain) to FcRn.

[0472] In a particular aspect, the Fc domain is engineered to have reduced binding affinity to an Fc receptor and/or reduced effector function, as compared to a non-engineered Fc domain. In a particular aspect, the Fc domain of the bispecific antigen binding molecule of the invention comprises one or more amino acid mutation that reduces the binding affinity of the Fc domain to an Fc receptor and/or effector function. Typically, the same one or more amino acid mutation is present in each of the two subunits of the Fc domain. In one aspect, the amino acid mutation reduces the binding affinity of the Fc domain to an Fc receptor. In another aspect, the amino acid mutation reduces the binding affinity of the Fc domain to an Fc receptor by at least 2-fold, at least 5-fold, or at least 10-fold. In one aspect, the bispecific antigen binding molecule of the invention comprising an engineered Fc domain exhibits less than 20%, particularly less than 10%, more particularly less than 5% of the binding affinity to an Fc receptor as compared to bispecific antibodies of the invention comprising a non-engineered Fc domain. In a particular aspect, the Fc receptor is an Fcγ receptor. In other aspects, the Fc receptor is a human Fc receptor. In one aspect, the Fc receptor is an inhibitory Fc receptor. In a specific aspect, the Fc receptor is an inhibitory human Fcγ receptor, more specifically human FcγRIIB. In some aspects the Fc receptor is an activating Fc receptor. In a specific aspect, the Fc receptor is an activating human Fcγ receptor, more specifically human FcγRIIIa, FcγRI or FcγRIIa, most specifically human FcγRIIIa. Preferably, binding to each of these receptors is reduced. In some aspects, binding affinity to a complement component, specifically binding affinity to C1q, is also reduced. In one aspect, binding affinity to neonatal Fc receptor (FcRn) is not reduced. Substantially similar binding to FcRn, i.e. preservation of the binding affinity of the Fc domain to said receptor, is achieved when the Fc domain (or the bispecific antigen binding molecule of the invention comprising said Fc domain) exhibits greater than about 70% of the binding affinity of a non-engineered form of the Fc domain (or the bispecific antigen binding molecule of the invention comprising said non-engineered form of the Fc domain) to FcRn. The Fc domain, or the bispecific antigen binding molecule of the invention comprising said Fc domain, may exhibit greater than about 80% and even greater than about 90% of such affinity. In certain embodiments the Fc domain of the bispecific antigen binding molecule of the invention is engineered to have reduced effector function, as compared to a non-engineered Fc domain. The reduced effector function can include, but is not limited to, one or more of the following: reduced complement dependent cytotoxicity (CDC), reduced antibody-dependent cell-mediated cytotoxicity (ADCC), reduced antibody-dependent cellular phagocytosis (ADCP), reduced cytokine secretion, reduced immune complex-mediated antigen uptake by antigen-presenting cells, reduced binding to NK cells, reduced binding to macrophages, reduced binding to monocytes, reduced binding to polymorphonuclear cells, reduced direct signaling inducing apoptosis, reduced dendritic cell maturation, or reduced T cell priming.

[0473] Antibodies with reduced effector function include those with substitution of one or more of Fc region residues 238, 265, 269, 270, 297, 327 and 329 (U.S. Pat. No. 6,737,056). Such Fc mutants include Fc mutants with substitutions at two or more of amino acid positions 265, 269, 270, 297 and 327, including the so-called “DANA” Fc mutant with substitution of residues 265 and 297 to alanine (U.S. Pat. No. 7,332,581). Certain antibody variants with improved or diminished binding to FcRs are described. (e.g. U.S. Pat. No. 6,737,056; WO 2004/056312, and Shields, R. L. et al., J. Biol. Chem. 276 (2001) 6591-6604).

[0474] In one aspect of the invention, the Fc domain comprises an amino acid substitution at a position of E233, L234, L235, N297, P331 and P329. In some aspects, the Fc domain comprises the amino acid substitutions L234A and L235A (“LALA”). In one such embodiment, the Fc domain is an IgG1 Fc domain, particularly a human IgG1 Fc domain. In one aspect, the Fc domain comprises an amino acid substitution at position P329. In a more specific aspect, the amino acid substitution is P329A or P329G, particularly P329G. In one embodiment the Fc domain comprises an amino acid substitution at position P329 and a further amino acid substitution selected from the group consisting of E233P, L234A, L235A, L235E, N297A, N297D or P331S. In more particular embodiments the Fc domain comprises the amino acid mutations L234A, L235A and P329G (“P329G LALA”). The “P329G LALA” combination of amino acid substitutions almost completely abolishes Fcγ receptor binding of a human IgG1 Fc domain, as described in PCT Patent Application No. WO 2012/130831 A1. Said document also describes methods of preparing such mutant Fc domains and methods for determining its properties such as Fc receptor binding or effector functions such antibody is an IgG1 with mutations L234A and L235A or with mutations L234A, L235A and P329G (numbering according to EU index of Kabat et al., Kabat et al., Sequences of Proteins of Immunological Interest, 5th Ed. Public Health Service, National Institutes of Health, Bethesda, Md., 1991).

[0475] In one aspect, the Fc domain is an IgG4 Fc domain. In a more specific embodiment, the Fc domain is an IgG4 Fc domain comprising an amino acid substitution at position 5228 (Kabat numbering), particularly the amino acid substitution S228P. In a more specific embodiment, the Fc domain is an IgG4 Fc domain comprising amino acid substitutions L235E and S228P and P329G. This amino acid substitution reduces in vivo Fab arm exchange of IgG4 antibodies (see Stubenrauch et al., Drug Metabolism and Disposition 38, 84-91 (2010)).

[0476] Antibodies with increased half-lives and improved binding to the neonatal Fc receptor (FcRn), which is responsible for the transfer of maternal IgGs to the fetus (Guyer, R. L. et al., J. Immunol. 117 (1976) 587-593, and Kim, J. K. et al., J. Immunol. 24 (1994) 2429-2434), are described in US 2005/0014934. Those antibodies comprise an Fc region with one or more substitutions therein which improve binding of the Fc region to FcRn. Such Fc variants include those with substitutions at one or more of Fc region residues: 238, 256, 265, 272, 286, 303, 305, 307, 311, 312, 317, 340, 356, 360, 362, 376, 378, 380, 382, 413, 424 or 434, e.g., substitution of Fc region residue 434 (U.S. Pat. No. 7,371,826). See also Duncan, A. R. and Winter, G., Nature 322 (1988) 738-740; U.S. Pat. No. 5,648,260; U.S. Pat. No. 5,624,821; and WO 94/29351 concerning other examples of Fc region variants.

[0477] Binding to Fc receptors can be easily determined e.g. by ELISA, or by Surface Plasmon Resonance (SPR) using standard instrumentation such as a BIAcore instrument (GE Healthcare), and Fc receptors such as may be obtained by recombinant expression. A suitable such binding assay is described herein. Alternatively, binding affinity of Fc domains or cell activating bispecific antigen binding molecules comprising an Fc domain for Fc receptors may be evaluated using cell lines known to express particular Fc receptors, such as human NK cells expressing FcγIIIa receptor. Effector function of an Fc domain, or bispecific antibodies of the invention comprising an Fc domain, can be measured by methods known in the art. A suitable assay for measuring ADCC is described herein. Other examples of in vitro assays to assess ADCC activity of a molecule of interest are described in U.S. Pat. No. 5,500,362; Hellstrom et al. Proc Natl Acad Sci USA 83, 7059-7063 (1986) and Hellstrom et al., Proc Natl Acad Sci USA 82, 1499-1502 (1985); U.S. Pat. No. 5,821,337; Bruggemann et al., J Exp Med 166, 1351-1361 (1987). Alternatively, non-radioactive assays methods may be employed (see, for example, ACTI™ non-radioactive cytotoxicity assay for flow cytometry (Cell Technology, Inc. Mountain View, Calif.); and CytoTox 96® non-radioactive cytotoxicity assay (Promega, Madison, Wis.)). Useful effector cells for such assays include peripheral blood mononuclear cells (PBMC) and Natural Killer (NK) cells. Alternatively, or additionally, ADCC activity of the molecule of interest may be assessed in vivo, e.g. in an animal model such as that disclosed in Clynes et al., Proc Natl Acad Sci USA 95, 652-656 (1998).

[0478] The following section describes preferred aspects of the bispecific antigen binding molecules of the invention comprising Fc domain modifications reducing Fc receptor binding and/or effector function. In one aspect, the invention relates to the bispecific antigen binding molecule (a) at least one moiety capable of specific binding to a costimulatory TNF receptor family member, (b) at least one moiety capable of specific binding to a target cell antigen, and (e) a Fc domain composed of a first and a second subunit capable of stable association, wherein the Fc domain comprises one or more amino acid substitution that reduces the binding affinity of the antibody to an Fc receptor, in particular towards Fey receptor. In another aspect, the invention relates to the bispecific antigen binding molecule comprising (a) at least one moiety capable of specific binding to a costimulatory TNF receptor family member, (b) at least one moiety capable of specific binding to a target cell antigen, and (e) a Fc domain composed of a first and a second subunit capable of stable association, wherein the Fc domain comprises one or more amino acid substitution that reduces effector function. In particular aspect, the Fc domain is of human IgG1 subclass with the amino acid mutations L234A, L235A and P329G (numbering according to Kabat EU index).

[0479] Fc Domain Modifications Promoting Heterodimerization

[0480] In some aspects of the invention, the bispecific antigen binding molecules of the invention comprise different antigen-binding sites, fused to one or the other of the two subunits of the Fc domain, thus the two subunits of the Fc domain may be comprised in two non-identical polypeptide chains. Recombinant co-expression of these polypeptides and subsequent dimerization leads to several possible combinations of the two polypeptides. To improve the yield and purity of the bispecific antibodies of the invention in recombinant production, it will thus be advantageous to introduce in the Fc domain of the bispecific antigen binding molecules of the invention a modification promoting the association of the desired polypeptides.

[0481] Accordingly, in particular aspects the invention relates to the bispecific antigen binding molecule comprising (a) four moieties capable of specific binding to a costimulatory TNF receptor family member, (b) at least one moiety capable of specific binding to a target cell antigen, and (c) a Fc domain composed of a first and a second subunit capable of stable association, wherein the Fc domain comprises a modification promoting the association of the first and second subunit of the Fc domain. The site of most extensive protein-protein interaction between the two subunits of a human IgG Fc domain is in the CH3 domain of the Fc domain. Thus, in one aspect said modification is in the CH3 domain of the Fc domain.

[0482] In a specific aspect said modification is a so-called “knob-into-hole” modification, comprising a “knob” modification in one of the two subunits of the Fc domain and a “hole” modification in the other one of the two subunits of the Fc domain. Thus, the invention relates to the bispecific antigen binding molecule comprising (a) four moieties capable of specific binding to a costimulatory TNF receptor family member, (b) at least one moiety capable of specific binding to a target cell antigen, and (c) a Fc domain composed of a first and a second subunit capable of stable association, wherein the first subunit of the Fc domain comprises knobs and the second subunit of the Fc domain comprises holes according to the knobs into holes method. In a particular aspect, the first subunit of the Fc domain comprises the amino acid substitutions S354C and T366W (EU numbering) and the second subunit of the Fc domain comprises the amino acid substitutions Y349C, T366S and Y407V (numbering according to Kabat EU index).

[0483] The knob-into-hole technology is described e.g. in U.S. Pat. No. 5,731,168; U.S. Pat. No. 7,695,936; Ridgway et al., Prot Eng 9, 617-621 (1996) and Carter, J Immunol Meth 248, 7-15 (2001). Generally, the method involves introducing a protuberance (“knob”) at the interface of a first polypeptide and a corresponding cavity (“hole”) in the interface of a second polypeptide, such that the protuberance can be positioned in the cavity so as to promote heterodimer formation and hinder homodimer formation. Protuberances are constructed by replacing small amino acid side chains from the interface of the first polypeptide with larger side chains (e.g. tyrosine or tryptophan). Compensatory cavities of identical or similar size to the protuberances are created in the interface of the second polypeptide by replacing large amino acid side chains with smaller ones (e.g. alanine or threonine).

[0484] Accordingly, in one aspect, in the CH3 domain of the first subunit of the Fc domain of the bispecific antigen binding molecules of the invention an amino acid residue is replaced with an amino acid residue having a larger side chain volume, thereby generating a protuberance within the CH3 domain of the first subunit which is positionable in a cavity within the CH3 domain of the second subunit, and in the CH3 domain of the second subunit of the Fc domain an amino acid residue is replaced with an amino acid residue having a smaller side chain volume, thereby generating a cavity within the CH3 domain of the second subunit within which the protuberance within the CH3 domain of the first subunit is positionable. The protuberance and cavity can be made by altering the nucleic acid encoding the polypeptides, e.g. by site-specific mutagenesis, or by peptide synthesis. In a specific aspect, in the CH3 domain of the first subunit of the Fc domain the threonine residue at position 366 is replaced with a tryptophan residue (T366W), and in the CH3 domain of the second subunit of the Fc domain the tyrosine residue at position 407 is replaced with a valine residue (Y407V). In one aspect, in the second subunit of the Fc domain additionally the threonine residue at position 366 is replaced with a serine residue (T366S) and the leucine residue at position 368 is replaced with an alanine residue (L368A).

[0485] In yet a further aspect, in the first subunit of the Fc domain additionally the serine residue at position 354 is replaced with a cysteine residue (S354C), and in the second subunit of the Fc domain additionally the tyrosine residue at position 349 is replaced by a cysteine residue (Y349C). Introduction of these two cysteine residues results in formation of a disulfide bridge between the two subunits of the Fc domain, further stabilizing the dimer (Carter (2001), J Immunol Methods 248, 7-15). In a particular aspect, the first subunit of the Fc domain comprises the amino acid substitutions S354C and T366W (EU numbering) and the second subunit of the Fc domain comprises the amino acid substitutions Y349C, T366S and Y407V (numbering according to Kabat EU index).

[0486] In an alternative aspect, a modification promoting association of the first and the second subunit of the Fc domain comprises a modification mediating electrostatic steering effects, e.g. as described in PCT publication WO 2009/089004. Generally, this method involves replacement of one or more amino acid residues at the interface of the two Fc domain subunits by charged amino acid residues so that homodimer formation becomes electrostatically unfavorable but heterodimerization electrostatically favorable.

[0487] Modifications in the Fab Domains

[0488] In one aspect, the invention relates to a bispecific antigen binding molecule comprising (a) four Fab fragments capable of specific binding to a costimulatory TNF receptor family member, (b) two Fab fragment capable of specific binding to a target cell antigen, and (c) a Fc domain composed of a first and a second subunit capable of stable association, wherein in the four Fab fragments capable of specific binding to a costimulatory TNF receptor family member or in the two Fab fragments capable of specific binding to a target cell antigen either the variable domains VH and VL or the constant domains CH1 and CL are exchanged. The bispecific antibodies are prepared according to the Crossmab technology.

[0489] Multispecific antibodies with a domain replacement/exchange in one binding arm (CrossMabVH-VL or CrossMabCH-CL) are described in detail in WO2009/080252 and Schaefer, W. et al, PNAS, 108 (2011) 11187-1191. They clearly reduce the byproducts caused by the mismatch of a light chain against a first antigen with the wrong heavy chain against the second antigen (compared to approaches without such domain exchange).

[0490] In one aspect, the invention relates to a bispecific antigen binding molecule comprising (a) a four Fab fragments capable of specific binding to a costimulatory TNF receptor family member, (b) two Fab fragments capable of specific binding to a target cell antigen, and (c) a Fc domain composed of a first and a second subunit capable of stable association, wherein in the two Fab fragments capable of specific binding to a target cell antigen the variable domains VL and VH are replaced by each other so that the VH domain is part of the light chain and the VL domain is part of the heavy chain.

[0491] In another aspect, the invention relates to a bispecific antigen binding molecule comprising (a) a four Fab fragments capable of specific binding to a costimulatory TNF receptor family member, (b) two Fab fragments capable of specific binding to a target cell antigen, and (c) a Fc domain composed of a first and a second subunit capable of stable association, wherein in the two Fab fragments capable of specific binding to a target cell antigen the constant domains CL and CH1 are replaced by each other so that the CH1 domain is part of the light chain and the CL domain is part of the heavy chain.

[0492] In another aspect, the invention relates to a bispecific antigen binding molecule, comprising (a) four light chains and two heavy chains of an antibody comprising four Fab fragments capable of specific binding to a costimulatory TNF receptor family member and the Fc domain, and (b) two additional Fab fragments capable of specific binding to a target cell antigen, wherein said additional Fab fragments are each connected via a peptide linker, in particular (G45)₄, to the C-terminus of the heavy chains of (a). In a particular aspect, the additional Fab fragments are cross-Fab fragments, wherein the variable domains VL and VH are replaced by each other so that the VH domain is part of the light chain and the VL domain is part of the heavy chain, or wherein the constant domains CL and CH1 are replaced by each other so that the CH1 domain is part of the light chain and the CL domain is part of the heavy chain,

[0493] Thus, in a particular aspect, the invention comprises a bispecific, antigen binding molecule, comprising (a) four light chains and two heavy chains of an antibody comprising four Fab fragments capable of specific binding to a costimulatory TNF receptor family member and the Fc domain, and (b) two additional Fab fragments capable of specific binding to a target cell antigen, wherein said two additional Fab fragments capable of specific binding to a target cell antigen are crossover Fab fragments wherein the variable domains VL and VH are replaced by each other and the VL-CH chains are each connected via a peptide linker to the C-terminus of the heavy chains of (a). In a particular aspect, the peptide linker is (G4S)₄.

[0494] In another aspect, and to further improve correct pairing of the different heavy and light chains, the bispecific antigen binding molecule comprising (a) four light chains and two heavy chains of an antibody comprising four Fab fragments capable of specific binding to a costimulatory TNF receptor family member and the Fc domain, and (b) two additional Fab fragments capable of specific binding to a target cell antigen, can contain different charged amino acid substitutions (so-called “charged residues”). These modifications are introduced in the crossed or non-crossed CH1 and CL domains. In one aspect, in the constant domain CL of one of CL domains of the four Fab fragments capable of specific binding to a costimulatory TNF receptor family member the amino acid at position 123 is substituted by R and the amino acid as position 124 is substituted by K (numbering according to EU index of Kabat). In a further aspect, in the constant domain CH1 of one of CH1 domains of the four Fab fragments capable of specific binding to a costimulatory TNF receptor family member the amino acids at position 147 and 213 are substituted by E (numbering according to EU index of Kabat).

[0495] In a particular aspect, the invention relates to a bispecific antigen binding molecule, wherein in one of CL domains of the four Fab fragments capable of specific binding to a costimulatory TNF receptor family member the amino acid at position 123 (EU numbering) has been replaced by arginine (R) and the amino acid at position 124 (EU numbering) has been substituted by lysine (K) and wherein in one of the CH1 domains of the four Fab fragments capable of specific binding to a costimulatory TNF receptor family member the amino acids at position 147 (EU numbering) and at position 213 (EU numbering) have been substituted by glutamic acid (E).

[0496] More particularly, the invention relates to a bispecific binding molecule comprising Fab fragments, wherein in the CL domain adjacent to the variable domains capable of specific binding to a costimulatory TNF receptor family member the amino acid at position 123 (EU numbering) has been replaced by arginine (R) and the amino acid at position 124 (EU numbering) has been substituted by lysine (K), and wherein in the CH1 domain adjacent to the TNF ligand family member the amino acids at position 147 (EU numbering) and at position 213 (EU numbering) have been substituted by glutamic acid (E).

[0497] Exemplary Antibodies of the Invention

[0498] In one aspect, the invention provides a new antibody and fragments thereof that specifically bind to GITR. In particular, provided is an antibody that specifically binds to GITR, wherein said antibody comprises (a) a VH domain comprising CDR-H1 comprising the amino acid sequence of SEQ ID NO:371, CDR-H2 comprising the amino acid sequence of SEQ ID NO:372, CDR-H3 comprising the amino acid sequence of SEQ ID NO:373 and a VL domain comprising CDR-L1 comprising the amino acid sequence of SEQ ID NO:374, CDR-H2 comprising the amino acid sequence of SEQ ID NO:375 and CDR-H3 comprising the amino acid sequence of SEQ ID NO:376.

[0499] In one aspect, provided is an antibody that specifically binds to GITR, wherein said antibody comprises a heavy chain variable region VH comprising an amino acid sequence of SEQ ID NO:383 and a light chain variable region VL comprising an amino acid sequence of SEQ ID NO:384.

[0500] In a further aspect, provided is an antibody that competes for binding with an antibody that specifically binds to GITR, wherein said antibody comprises a heavy chain variable region VH comprising an amino acid sequence of SEQ ID NO:383 and a light chain variable region VL comprising an amino acid sequence of SEQ ID NO:384.

[0501] Polynucleotides

[0502] The invention further provides isolated polynucleotides encoding a bispecific antigen binding molecule as described herein or a fragment thereof.

[0503] The isolated polynucleotides encoding bispecific antibodies of the invention may be expressed as a single polynucleotide that encodes the entire antigen binding molecule or as multiple (e.g., two or more) polynucleotides that are co-expressed. Polypeptides encoded by polynucleotides that are co-expressed may associate through, e.g., disulfide bonds or other means to form a functional antigen binding molecule. For example, the light chain portion of an immunoglobulin may be encoded by a separate polynucleotide from the heavy chain portion of the immunoglobulin. When co-expressed, the heavy chain polypeptides will associate with the light chain polypeptides to form the immunoglobulin.

[0504] In some aspects, the isolated polynucleotide encodes a polypeptide comprised in the bispecific molecule according to the invention as described herein.

[0505] In one aspect, the isolated polynucleotide comprises a sequence selected from the group consisting of SEQ ID NO:151, SEQ ID NO:155, SEQ ID NO:159, SEQ ID:163, SEQ ID NO:167, SEQ ID NO:171, SEQ ID NO:175, SEQ ID NO:184, SEQ ID NO:211, SEQ ID NO:212, SEQ ID NO:215, SEQ ID NO:216, SEQ ID NO:223, SEQ ID NO:224, SEQ ID NO:225, SEQ ID NO:235 and SEQ ID NO:236. In a particular, provided is a bispecific antigen binding molecule encoded by polynucleotides comprising the sequences of SEQ ID NO:155, SEQ ID NO:211 and SEQ ID NO:212 or by polynucleotides comprising the sequences of SEQ ID NO:155, SEQ ID NO:215 and SEQ ID NO:216.

[0506] In another aspect, the isolated polynucleotide comprises a sequence selected from the group consisting of SEQ ID NO:287, SEQ ID NO:291, SEQ ID NO:295, SEQ ID:299, SEQ ID NO:303, SEQ ID NO:325, SEQ ID NO:326, SEQ ID NO:329, SEQ ID NO:330, SEQ ID NO:333, SEQ ID NO:334, SEQ ID NO:337, SEQ ID NO:338, SEQ ID NO:341, SEQ ID NO:342, SEQ ID NO:345, SEQ ID NO:346, SEQ ID NO:349, SEQ ID NO:350, SEQ ID NO:353 and SEQ ID NO:354.

[0507] In another aspect, the isolated polynucleotide comprises a sequence selected from the group consisting of SEQ ID NO:391, SEQ ID NO:399, SEQ ID NO:400, SEQ ID:407 and SEQ ID NO:408.

[0508] In one aspect, the present invention is directed to an isolated polynucleotide encoding a bispecific antigen binding molecule, comprising (a) four moieties capable of specific binding to OX40, (b) at least one moiety capable of specific binding to a target cell antigen, and (c) a Fc domain composed of a first and a second subunit capable of stable association.

[0509] In another aspect, the present invention is directed to an isolated polynucleotide encoding a bispecific antigen binding molecule, comprising (a) four moieties capable of specific binding to 4-1BB, (b) at least one moiety capable of specific binding to a target cell antigen, and (c) a Fc domain composed of a first and a second subunit capable of stable association.

[0510] In a further aspect, the present invention is directed to an isolated polynucleotide encoding a bispecific antigen binding molecule, comprising (a) four moieties capable of specific binding to GITR, (b) at least one moiety capable of specific binding to a target cell antigen, and (c) a Fc domain composed of a first and a second subunit capable of stable association.

[0511] In certain embodiments the polynucleotide or nucleic acid is DNA. In other embodiments, a polynucleotide of the present invention is RNA, for example, in the form of messenger RNA (mRNA). RNA of the present invention may be single stranded or double stranded.

[0512] Recombinant Methods

[0513] Bispecific antibodies of the invention may be obtained, for example, by solid-state peptide synthesis (e.g. Merrifield solid phase synthesis) or recombinant production. For recombinant production one or more polynucleotide encoding the bispecific antigen binding molecule or polypeptide fragments thereof, e.g., as described above, is isolated and inserted into one or more vectors for further cloning and/or expression in a host cell. Such polynucleotide may be readily isolated and sequenced using conventional procedures. In one aspect of the invention, a vector, preferably an expression vector, comprising one or more of the polynucleotides of the invention is provided. Methods which are well known to those skilled in the art can be used to construct expression vectors containing the coding sequence of the bispecific antigen binding molecule (fragment) along with appropriate transcriptional/translational control signals. These methods include in vitro recombinant DNA techniques, synthetic techniques and in vivo recombination/genetic recombination. See, for example, the techniques described in Maniatis et al., MOLECULAR CLONING: A LABORATORY MANUAL, Cold Spring Harbor Laboratory, N.Y. (1989); and Ausubel et al., CURRENT PROTOCOLS IN MOLECULAR BIOLOGY, Greene Publishing Associates and Wiley Interscience, N.Y. (1989). The expression vector can be part of a plasmid, virus, or may be a nucleic acid fragment. The expression vector includes an expression cassette into which the polynucleotide encoding the bispecific antigen binding molecule or polypeptide fragments thereof (i.e. the coding region) is cloned in operable association with a promoter and/or other transcription or translation control elements. As used herein, a “coding region” is a portion of nucleic acid which consists of codons translated into amino acids. Although a “stop codon” (TAG, TGA, or TAA) is not translated into an amino acid, it may be considered to be part of a coding region, if present, but any flanking sequences, for example promoters, ribosome binding sites, transcriptional terminators, introns, 5′ and 3′ untranslated regions, and the like, are not part of a coding region. Two or more coding regions can be present in a single polynucleotide construct, e.g. on a single vector, or in separate polynucleotide constructs, e.g. on separate (different) vectors. Furthermore, any vector may contain a single coding region, or may comprise two or more coding regions, e.g. a vector of the present invention may encode one or more polypeptides, which are post- or co-translationally separated into the final proteins via proteolytic cleavage. In addition, a vector, polynucleotide, or nucleic acid of the invention may encode heterologous coding regions, either fused or unfused to a polynucleotide encoding the bispecific antigen binding molecule of the invention or polypeptide fragments thereof, or variants or derivatives thereof. Heterologous coding regions include without limitation specialized elements or motifs, such as a secretory signal peptide or a heterologous functional domain. An operable association is when a coding region for a gene product, e.g. a polypeptide, is associated with one or more regulatory sequences in such a way as to place expression of the gene product under the influence or control of the regulatory sequence(s). Two DNA fragments (such as a polypeptide coding region and a promoter associated therewith) are “operably associated” if induction of promoter function results in the transcription of mRNA encoding the desired gene product and if the nature of the linkage between the two DNA fragments does not interfere with the ability of the expression regulatory sequences to direct the expression of the gene product or interfere with the ability of the DNA template to be transcribed. Thus, a promoter region would be operably associated with a nucleic acid encoding a polypeptide if the promoter was capable of effecting transcription of that nucleic acid. The promoter may be a cell-specific promoter that directs substantial transcription of the DNA only in predetermined cells. Other transcription control elements, besides a promoter, for example enhancers, operators, repressors, and transcription termination signals, can be operably associated with the polynucleotide to direct cell-specific transcription.

[0514] Suitable promoters and other transcription control regions are disclosed herein. A variety of transcription control regions are known to those skilled in the art. These include, without limitation, transcription control regions, which function in vertebrate cells, such as, but not limited to, promoter and enhancer segments from cytomegaloviruses (e.g. the immediate early promoter, in conjunction with intron-A), simian virus 40 (e.g. the early promoter), and retroviruses (such as, e.g. Rous sarcoma virus). Other transcription control regions include those derived from vertebrate genes such as actin, heat shock protein, bovine growth hormone and rabbit a-globin, as well as other sequences capable of controlling gene expression in eukaryotic cells. Additional suitable transcription control regions include tissue-specific promoters and enhancers as well as inducible promoters (e.g. tetracycline-inducible promoters). Similarly, a variety of translation control elements are known to those of ordinary skill in the art. These include, but are not limited to ribosome binding sites, translation initiation and termination codons, and elements derived from viral systems (particularly an internal ribosome entry site, or IRES, also referred to as a CITE sequence). The expression cassette may also include other features such as an origin of replication, and/or chromosome integration elements such as retroviral long terminal repeats (LTRs), or adeno-associated viral (AAV) inverted terminal repeats (ITRs).

[0515] Polynucleotide and nucleic acid coding regions of the present invention may be associated with additional coding regions which encode secretory or signal peptides, which direct the secretion of a polypeptide encoded by a polynucleotide of the present invention. For example, if secretion of the bispecific antigen binding molecule or polypeptide fragments thereof is desired, DNA encoding a signal sequence may be placed upstream of the nucleic acid encoding the bispecific antigen binding molecule of the invention or polypeptide fragments thereof. According to the signal hypothesis, proteins secreted by mammalian cells have a signal peptide or secretory leader sequence which is cleaved from the mature protein once export of the growing protein chain across the rough endoplasmic reticulum has been initiated. Those of ordinary skill in the art are aware that polypeptides secreted by vertebrate cells generally have a signal peptide fused to the N-terminus of the polypeptide, which is cleaved from the translated polypeptide to produce a secreted or “mature” form of the polypeptide. In certain embodiments, the native signal peptide, e.g. an immunoglobulin heavy chain or light chain signal peptide is used, or a functional derivative of that sequence that retains the ability to direct the secretion of the polypeptide that is operably associated with it. Alternatively, a heterologous mammalian signal peptide, or a functional derivative thereof, may be used. For example, the wild-type leader sequence may be substituted with the leader sequence of human tissue plasminogen activator (TPA) or mouse β-glucuronidase.

[0516] DNA encoding a short protein sequence that could be used to facilitate later purification (e.g. a histidine tag) or assist in labeling the fusion protein may be included within or at the ends of the polynucleotide encoding a bispecific antigen binding molecule of the invention or polypeptide fragments thereof.

[0517] In a further aspect of the invention, a host cell comprising one or more polynucleotides of the invention is provided. In certain aspects, a host cell comprising one or more vectors of the invention is provided. The polynucleotides and vectors may incorporate any of the features, singly or in combination, described herein in relation to polynucleotides and vectors, respectively. In one aspect, a host cell comprises (e.g. has been transformed or transfected with) a vector comprising a polynucleotide that encodes (part of) a bispecific antigen binding molecule of the invention of the invention. As used herein, the term “host cell” refers to any kind of cellular system which can be engineered to generate the fusion proteins of the invention or fragments thereof. Host cells suitable for replicating and for supporting expression of antigen binding molecules are well known in the art. Such cells may be transfected or transduced as appropriate with the particular expression vector and large quantities of vector containing cells can be grown for seeding large scale fermenters to obtain sufficient quantities of the antigen binding molecule for clinical applications. Suitable host cells include prokaryotic microorganisms, such as E. coli, or various eukaryotic cells, such as Chinese hamster ovary cells (CHO), insect cells, or the like. For example, polypeptides may be produced in bacteria in particular when glycosylation is not needed. After expression, the polypeptide may be isolated from the bacterial cell paste in a soluble fraction and can be further purified. In addition to prokaryotes, eukaryotic microbes such as filamentous fungi or yeast are suitable cloning or expression hosts for polypeptide-encoding vectors, including fungi and yeast strains whose glycosylation pathways have been “humanized”, resulting in the production of a polypeptide with a partially or fully human glycosylation pattern. See Gerngross, Nat Biotech 22, 1409-1414 (2004), and Li et al., Nat Biotech 24, 210-215 (2006).

[0518] Suitable host cells for the expression of (glycosylated) polypeptides are also derived from multicellular organisms (invertebrates and vertebrates). Examples of invertebrate cells include plant and insect cells. Numerous baculoviral strains have been identified which may be used in conjunction with insect cells, particularly for transfection of Spodoptera frugiperda cells. Plant cell cultures can also be utilized as hosts. See e.g. U.S. Pat. Nos. 5,959,177, 6,040,498, 6,420,548, 7,125,978, and 6,417,429 (describing PLANTIBODIES™ technology for producing antibodies in transgenic plants). Vertebrate cells may also be used as hosts. For example, mammalian cell lines that are adapted to grow in suspension may be useful. Other examples of useful mammalian host cell lines are monkey kidney CV1 line transformed by SV40 (COS-7); human embryonic kidney line (293 or 293T cells as described, e.g., in Graham et al., J Gen Virol 36, 59 (1977)), baby hamster kidney cells (BHK), mouse sertoli cells (TM4 cells as described, e.g., in Mather, Biol Reprod 23, 243-251 (1980)), monkey kidney cells (CV1), African green monkey kidney cells (VERO-76), human cervical carcinoma cells (HELA), canine kidney cells (MDCK), buffalo rat liver cells (BRL 3A), human lung cells (W138), human liver cells (Hep G2), mouse mammary tumor cells (MMT 060562), TRI cells (as described, e.g., in Mather et al., Annals N.Y. Acad Sci 383, 44-68 (1982)), MRC 5 cells, and FS4 cells. Other useful mammalian host cell lines include Chinese hamster ovary (CHO) cells, including dhfr-CHO cells (Urlaub et al., Proc Natl Acad Sci USA 77, 4216 (1980)); and myeloma cell lines such as YO, NS0, P3X63 and Sp2/0. For a review of certain mammalian host cell lines suitable for protein production, see, e.g., Yazaki and Wu, Methods in Molecular Biology, Vol. 248 (B. K. C. Lo, ed., Humana Press, Totowa, N.J.), pp. 255-268 (2003). Host cells include cultured cells, e.g., mammalian cultured cells, yeast cells, insect cells, bacterial cells and plant cells, to name only a few, but also cells comprised within a transgenic animal, transgenic plant or cultured plant or animal tissue. In one embodiment, the host cell is a eukaryotic cell, preferably a mammalian cell, such as a Chinese Hamster Ovary (CHO) cell, a human embryonic kidney (HEK) cell or a lymphoid cell (e.g., Y0, NS0, Sp20 cell). Standard technologies are known in the art to express foreign genes in these systems. Cells expressing a polypeptide comprising either the heavy or the light chain of an immunoglobulin, may be engineered so as to also express the other of the immunoglobulin chains such that the expressed product is an immunoglobulin that has both a heavy and a light chain.

[0519] In one aspect, a method of producing a bispecific antigen binding molecule of the invention or polypeptide fragments thereof is provided, wherein the method comprises culturing a host cell comprising polynucleotides encoding the bispecific antigen binding molecule of the invention or polypeptide fragments thereof, as provided herein, under conditions suitable for expression of the bispecific antigen binding molecule of the invention or polypeptide fragments thereof, and recovering the bispecific antigen binding molecule of the invention or polypeptide fragments thereof from the host cell (or host cell culture medium).

[0520] Bispecific molecules of the invention prepared as described herein may be purified by art-known techniques such as high performance liquid chromatography, ion exchange chromatography, gel electrophoresis, affinity chromatography, size exclusion chromatography, and the like. The actual conditions used to purify a particular protein will depend, in part, on factors such as net charge, hydrophobicity, hydrophilicity etc., and will be apparent to those having skill in the art. For affinity chromatography purification an antibody, ligand, receptor or antigen can be used to which the bispecific antigen binding molecule binds. For example, for affinity chromatography purification of fusion proteins of the invention, a matrix with protein A or protein G may be used. Sequential Protein A or G affinity chromatography and size exclusion chromatography can be used to isolate an antigen binding molecule essentially as described in the examples. The purity of the bispecific antigen binding molecule or fragments thereof can be determined by any of a variety of well-known analytical methods including gel electrophoresis, high pressure liquid chromatography, and the like. For example, the bispecific antigen binding molecules expressed as described in the Examples were shown to be intact and properly assembled as demonstrated by reducing and non-reducing SDS-PAGE.

[0521] Assays

[0522] The antigen binding molecules provided herein may be identified, screened for, or characterized for their physical/chemical properties and/or biological activities by various assays known in the art.

[0523] 1. Affinity Assays

[0524] The affinity of the bispecific antigen binding molecules, antibodies and antibody fragments provided herein for the corresponding TNF receptor can be determined in accordance with the methods set forth in the examples by surface plasmon resonance (SPR), using standard instrumentation such as a BIAcore instrument (GE Healthcare), and receptors or target proteins such as may be obtained by recombinant expression. The affinity of the bispecific antigen binding molecule for the target cell antigen can also be determined by surface plasmon resonance (SPR), using standard instrumentation such as a BIAcore instrument (GE Healthcare), and receptors or target proteins such as may be obtained by recombinant expression. A specific illustrative and exemplary embodiment for measuring binding affinity is described in Example 2. According to one aspect, K_{D} is measured by surface plasmon resonance using a BIACORE® T100 machine (GE Healthcare) at 25° C.

[0525] 2. Binding Assays and Other Assays

[0526] Binding of the bispecific antigen binding molecule provided herein to the corresponding receptor expressing cells may be evaluated using cell lines expressing the particular receptor or target antigen, for example by flow cytometry (FACS). In one aspect, peripheral blood mononuclear cells (PBMCs) expressing the TNF receptor are used in the binding assay. These cells are used directly after isolation (naïve PMBCs) or after stimulation (activated PMBCs). In another aspect, activated mouse splenocytes (expressing the TNF receptor molecule) were used to demonstrate the binding of the bispecific antigen binding molecule or antibody of the invention to the corresponding TNF receptor expressing cells. In a further aspect, PBMC isolated from heparinized blood of healthy Macaca fascicularis were used to show of the bispecific antigen binding molecule or antibody to the corresponding cynomolgus TNF receptor expressing cells.

[0527] In a further aspect, cancer cell lines expressing the target cell antigen, for example FAP, were used to demonstrate the binding of the antigen binding molecules to the target cell antigen.

[0528] In another aspect, competition assays may be used to identify an antigen binding molecule that competes with a specific antibody or antigen binding molecule for binding to the target or TNF receptor, respectively. In certain embodiments, such a competing antigen binding molecule binds to the same epitope (e.g., a linear or a conformational epitope) that is bound by a specific anti-target antibody or a specific anti-TNF receptor antibody. Detailed exemplary methods for mapping an epitope to which an antibody binds are provided in Morris (1996) “Epitope Mapping Protocols,” in Methods in Molecular Biology vol. 66 (Humana Press, Totowa, N.J.).

[0529] 3. Activity Assays

[0530] In one aspect, assays are provided for identifying bispecific antigen binding molecules that bind to a specific target cell antigen and to a specific TNF receptor having biological activity. Biological activity may include, e.g., agonistic signaling through the TNF receptor on cells expressing the target cell antigen. TNF family ligand trimer-containing antigen binding molecules identified by the assays as having such biological activity in vitro are also provided.

[0531] In certain aspects, a bispecific antigen binding molecule of the invention is tested for such biological activity. Furthermore, assays for detecting cell lysis (e.g. by measurement of LDH release), induced apoptosis kinetics (e.g. by measurement of Caspase 3/7 activity) or apoptosis (e.g. using the TUNEL assay) are well known in the art. In addition the biological activity of such complexes can be assessed by evaluating their effects on survival, proliferation and lymphokine secretion of various lymphocyte subsets such as NK cells, NKT-cells or γδ T-cells or assessing their capacity to modulate phenotype and function of antigen presenting cells such as dendritic cells, monocytes/macrophages or B-cells.

[0532] Pharmaceutical Compositions, Formulations and Routes of Administration

[0533] In a further aspect, the invention provides pharmaceutical compositions comprising any of the bispecific antigen binding molecules or antibodies provided herein, e.g., for use in any of the below therapeutic methods. In one embodiment, a pharmaceutical composition comprises any of the bispecific antigen binding molecules provided herein and at least one pharmaceutically acceptable excipient. In another embodiment, a pharmaceutical composition comprises any of the bispecific antigen binding molecules provided herein and at least one additional therapeutic agent, e.g., as described below.

[0534] Pharmaceutical compositions of the present invention comprise a therapeutically effective amount of one or more bispecific antigen binding molecules dissolved or dispersed in a pharmaceutically acceptable excipient. The phrases “pharmaceutical or pharmacologically acceptable” refers to molecular entities and compositions that are generally non-toxic to recipients at the dosages and concentrations employed, i.e. do not produce an adverse, allergic or other untoward reaction when administered to an animal, such as, for example, a human, as appropriate. The preparation of a pharmaceutical composition that contains at least one bispecific antigen binding molecule or antibody according to the invention and optionally an additional active ingredient will be known to those of skill in the art in light of the present disclosure, as exemplified by Remington's Pharmaceutical Sciences, 18th Ed. Mack Printing Company, 1990, incorporated herein by reference. In particular, the compositions are lyophilized formulations or aqueous solutions. As used herein, “pharmaceutically acceptable excipient” includes any and all solvents, buffers, dispersion media, coatings, surfactants, antioxidants, preservatives (e.g. antibacterial agents, antifungal agents), isotonic agents, salts, stabilizers and combinations thereof, as would be known to one of ordinary skill in the art.

[0535] Parenteral compositions include those designed for administration by injection, e.g. subcutaneous, intradermal, intralesional, intravenous, intraarterial intramuscular, intrathecal or intraperitoneal injection. For injection, the bispecific antigen binding molecules or antibodies of the invention may be formulated in aqueous solutions, preferably in physiologically compatible buffers such as Hanks' solution, Ringer's solution, or physiological saline buffer. The solution may contain formulatory agents such as suspending, stabilizing and/or dispersing agents. Alternatively, the bispecific antigen binding molecules or antibodies may be in powder form for constitution with a suitable vehicle, e.g., sterile pyrogen-free water, before use. Sterile injectable solutions are prepared by incorporating the antigen binding molecules of the invention in the required amount in the appropriate solvent with various of the other ingredients enumerated below, as required. Sterility may be readily accomplished, e.g., by filtration through sterile filtration membranes. Generally, dispersions are prepared by incorporating the various sterilized active ingredients into a sterile vehicle which contains the basic dispersion medium and/or the other ingredients. In the case of sterile powders for the preparation of sterile injectable solutions, suspensions or emulsion, the preferred methods of preparation are vacuum-drying or freeze-drying techniques which yield a powder of the active ingredient plus any additional desired ingredient from a previously sterile-filtered liquid medium thereof. The liquid medium should be suitably buffered if necessary and the liquid diluent first rendered isotonic prior to injection with sufficient saline or glucose. The composition must be stable under the conditions of manufacture and storage, and preserved against the contaminating action of microorganisms, such as bacteria and fungi. It will be appreciated that endotoxin contamination should be kept minimally at a safe level, for example, less than 0.5 ng/mg protein. Suitable pharmaceutically acceptable excipients include, but are not limited to: buffers such as phosphate, citrate, and other organic acids; antioxidants including ascorbic acid and methionine; preservatives (such as octadecyldimethylbenzyl ammonium chloride; hexamethonium chloride; benzalkonium chloride; benzethonium chloride; phenol, butyl or benzyl alcohol; alkyl parabens such as methyl or propyl paraben; catechol; resorcinol; cyclohexanol; 3-pentanol; and m-cresol); low molecular weight (less than about 10 residues) polypeptides; proteins, such as serum albumin, gelatin, or immunoglobulins; hydrophilic polymers such as polyvinylpyrrolidone; amino acids such as glycine, glutamine, asparagine, histidine, arginine, or lysine; monosaccharides, disaccharides, and other carbohydrates including glucose, mannose, or dextrins; chelating agents such as EDTA; sugars such as sucrose, mannitol, trehalose or sorbitol; salt-forming counter-ions such as sodium; metal complexes (e.g. Zn-protein complexes); and/or non-ionic surfactants such as polyethylene glycol (PEG). Aqueous injection suspensions may contain compounds which increase the viscosity of the suspension, such as sodium carboxymethyl cellulose, sorbitol, dextran, or the like. Optionally, the suspension may also contain suitable stabilizers or agents which increase the solubility of the compounds to allow for the preparation of highly concentrated solutions. Additionally, suspensions of the active compounds may be prepared as appropriate oily injection suspensions. Suitable lipophilic solvents or vehicles include fatty oils such as sesame oil, or synthetic fatty acid esters, such as ethyl cleats or triglycerides, or liposomes.

[0536] Active ingredients may be entrapped in microcapsules prepared, for example, by coacervation techniques or by interfacial polymerization, for example, hydroxymethylcellulose or gelatin-microcapsules and poly-(methylmethacylate) microcapsules, respectively, in colloidal drug delivery systems (for example, liposomes, albumin microspheres, microemulsions, nano-particles and nanocapsules) or in macroemulsions. Such techniques are disclosed in Remington's Pharmaceutical Sciences (18th Ed. Mack Printing Company, 1990). Sustained-release preparations may be prepared. Suitable examples of sustained-release preparations include semipermeable matrices of solid hydrophobic polymers containing the polypeptide, which matrices are in the form of shaped articles, e.g. films, or microcapsules. In particular embodiments, prolonged absorption of an injectable composition can be brought about by the use in the compositions of agents delaying absorption, such as, for example, aluminum monostearate, gelatin or combinations thereof.

[0537] Exemplary pharmaceutically acceptable excipients herein further include interstitial drug dispersion agents such as soluble neutral-active hyaluronidase glycoproteins (sHASEGP), for example, human soluble PH-20 hyaluronidase glycoproteins, such as rHuPH20 (HYLENEX®, Baxter International, Inc.). Certain exemplary sHASEGPs and methods of use, including rHuPH20, are described in US Patent Publication Nos. 2005/0260186 and 2006/0104968. In one aspect, a sHASEGP is combined with one or more additional glycosaminoglycanases such as chondroitinases.

[0538] Exemplary lyophilized antibody formulations are described in U.S. Pat. No. 6,267,958. Aqueous antibody formulations include those described in U.S. Pat. No. 6,171,586 and WO2006/044908, the latter formulations including a histidine-acetate buffer.

[0539] In addition to the compositions described previously, the antigen binding molecules may also be formulated as a depot preparation. Such long acting formulations may be administered by implantation (for example subcutaneously or intramuscularly) or by intramuscular injection. Thus, for example, the fusion proteins may be formulated with suitable polymeric or hydrophobic materials (for example as emulsion in an acceptable oil) or ion exchange resins, or as sparingly soluble derivatives, for example, as a sparingly soluble salt.

[0540] Pharmaceutical compositions comprising the bispecific antigen binding molecules or antibodies of the invention may be manufactured by means of conventional mixing, dissolving, emulsifying, encapsulating, entrapping or lyophilizing processes. Pharmaceutical compositions may be formulated in conventional manner using one or more physiologically acceptable carriers, diluents, excipients or auxiliaries which facilitate processing of the proteins into preparations that can be used pharmaceutically. Proper formulation is dependent upon the route of administration chosen.

[0541] The bispecific antigen binding molecules may be formulated into a composition in a free acid or base, neutral or salt form. Pharmaceutically acceptable salts are salts that substantially retain the biological activity of the free acid or base. These include the acid addition salts, e.g. those formed with the free amino groups of a proteinaceous composition, or which are formed with inorganic acids such as for example, hydrochloric or phosphoric acids, or such organic acids as acetic, oxalic, tartaric or mandelic acid. Salts formed with the free carboxyl groups can also be derived from inorganic bases such as for example, sodium, potassium, ammonium, calcium or ferric hydroxides; or such organic bases as isopropylamine, trimethylamine, histidine or procaine. Pharmaceutical salts tend to be more soluble in aqueous and other protic solvents than are the corresponding free base forms.

[0542] The composition herein may also contain more than one active ingredients as necessary for the particular indication being treated, preferably those with complementary activities that do not adversely affect each other. Such active ingredients are suitably present in combination in amounts that are effective for the purpose intended.

[0543] The formulations to be used for in vivo administration are generally sterile. Sterility may be readily accomplished, e.g., by filtration through sterile filtration membranes.

[0544] Therapeutic Methods and Compositions

[0545] Any of the bispecific antigen binding molecules or antibodies provided herein may be used in therapeutic methods.

[0546] For use in therapeutic methods, bispecific antigen binding molecules or antibodies of the invention can be formulated, dosed, and administered in a fashion consistent with good medical practice. Factors for consideration in this context include the particular disorder being treated, the particular mammal being treated, the clinical condition of the individual patient, the cause of the disorder, the site of delivery of the agent, the method of administration, the scheduling of administration, and other factors known to medical practitioners.

[0547] In one aspect, bispecific antigen binding molecules or antibodies of the invention for use as a medicament are provided.

[0548] In further aspects, bispecific antigen binding molecules or antibodies of the invention for use (i) in stimulating or enhancing T cell response, (ii) for use in supporting survival of activated T cells, (iii) for use in the treatment of infections, (iv) for use in the treatment of cancer, (v) for use in delaying progression of cancer, or (vi) for use in prolonging the survival of a patient suffering from cancer, are provided. In a particular aspect, TNF family ligand trimer-containing antigen binding molecules or antibodies of the invention for use in treating a disease, in particular for use in the treatment of cancer, are provided.

[0549] In certain aspects, bispecific antigen binding molecules or antibodies of the invention for use in a method of treatment are provided. In one aspect, the invention provides a bispecific antigen binding molecule or antibody as described herein for use in the treatment of a disease in an individual in need thereof. In certain aspects, the invention provides a bispecific antigen binding molecule or antibody for use in a method of treating an individual having a disease comprising administering to the individual a therapeutically effective amount of the bispecific antigen binding molecule or antibody. In certain aspects the disease to be treated is cancer. The subject, patient, or “individual” in need of treatment is typically a mammal, more specifically a human.

[0550] In one aspect, provided is a method for (i) stimulating or enhancing T-cell response, (ii) supporting survival of activated T cells, (iii) treating infections, (iv) treating cancer, (v) delaying progression of cancer or (vi) prolonging the survival of a patient suffering from cancer, wherein the method comprises administering a therapeutically effective amount of the bispecific antigen binding molecule or antibody of the invention to an individual in need thereof.

[0551] In a further aspect, the invention provides for the use of the bispecific antigen binding molecule or antibody of the invention in the manufacture or preparation of a medicament for the treatment of a disease in an individual in need thereof. In one aspect the medicament is for use in a method of treating a disease comprising administering to an individual having the disease a therapeutically effective amount of the medicament. In certain aspects, the disease to be treated is a proliferative disorder, particularly cancer. Examples of cancers include bladder cancer, brain cancer, head and neck cancer, pancreatic cancer, lung cancer, breast cancer, ovarian cancer, uterine cancer, cervical cancer, endometrial cancer, esophageal cancer, colon cancer, colorectal cancer, rectal cancer, gastric cancer, prostate cancer, blood cancer, skin cancer, squamous cell carcinoma, bone cancer, and kidney cancer. Other cell proliferation disorders that can be treated using the bispecific antigen binding molecule or antibody of the invention include, but are not limited to neoplasms located in the: abdomen, bone, breast, digestive system, liver, pancreas, peritoneum, endocrine glands (adrenal, parathyroid, pituitary, testicles, ovary, thymus, thyroid), eye, head and neck, nervous system (central and peripheral), lymphatic system, pelvic, skin, soft tissue, spleen, thoracic region, and urogenital system. Also included are pre-cancerous conditions or lesions and cancer metastases. In certain embodiments the cancer is chosen from the group consisting of renal cell cancer, skin cancer, lung cancer, colorectal cancer, breast cancer, brain cancer, head and neck cancer. A skilled artisan readily recognizes that in many cases the bispecific antigen binding molecule or antibody of the invention may not provide a cure but may provide a benefit. In some aspects, a physiological change having some benefit is also considered therapeutically beneficial. Thus, in some aspects, an amount of the bispecific antigen binding molecule or antibody of the invention that provides a physiological change is considered an “effective amount” or a “therapeutically effective amount”.

[0552] For the prevention or treatment of disease, the appropriate dosage of a bispecific antigen binding molecule or antibody of the invention (when used alone or in combination with one or more other additional therapeutic agents) will depend on the type of disease to be treated, the route of administration, the body weight of the patient, the specific molecule, the severity and course of the disease, whether the bispecific antigen binding molecule or antibody of the invention is administered for preventive or therapeutic purposes, previous or concurrent therapeutic interventions, the patient's clinical history and response to the fusion protein, and the discretion of the attending physician. The practitioner responsible for administration will, in any event, determine the concentration of active ingredient(s) in a composition and appropriate dose(s) for the individual subject. Various dosing schedules including but not limited to single or multiple administrations over various time-points, bolus administration, and pulse infusion are contemplated herein.

[0553] The bispecific antigen binding molecule or antibody of the invention is suitably administered to the patient at one time or over a series of treatments. Depending on the type and severity of the disease, about 1 μg/kg to 15 mg/kg (e.g. 0.1 mg/kg-10 mg/kg) of TNF family ligand trimer-containing antigen binding molecule can be an initial candidate dosage for administration to the patient, whether, for example, by one or more separate administrations, or by continuous infusion. One typical daily dosage might range from about 1 μg/kg to 100 mg/kg or more, depending on the factors mentioned above. For repeated administrations over several days or longer, depending on the condition, the treatment would generally be sustained until a desired suppression of disease symptoms occurs. One exemplary dosage of the bispecific antigen binding molecule or antibody of the invention would be in the range from about 0.005 mg/kg to about 10 mg/kg. In other examples, a dose may also comprise from about 1 μg/kg body weight, about 5 μg/kg body weight, about 10 μg/kg body weight, about 50 μg/kg body weight, about 100 μg/kg body weight, about 200 μg/kg body weight, about 350 μg/kg body weight, about 500 μg/kg body weight, about 1 mg/kg body weight, about 5 mg/kg body weight, about 10 mg/kg body weight, about 50 mg/kg body weight, about 100 mg/kg body weight, about 200 mg/kg body weight, about 350 mg/kg body weight, about 500 mg/kg body weight, to about 1000 mg/kg body weight or more per administration, and any range derivable therein. In examples of a derivable range from the numbers listed herein, a range of about 5 mg/kg body weight to about 100 mg/kg body weight, about 5 μg/kg body weight to about 500 mg/kg body weight etc., can be administered, based on the numbers described above. Thus, one or more doses of about 0.5 mg/kg, 2.0 mg/kg, 5.0 mg/kg or 10 mg/kg (or any combination thereof) may be administered to the patient. Such doses may be administered intermittently, e.g. every week or every three weeks (e.g. such that the patient receives from about two to about twenty, or e.g. about six doses of the fusion protein). An initial higher loading dose, followed by one or more lower doses may be administered. However, other dosage regimens may be useful. The progress of this therapy is easily monitored by conventional techniques and assays.

[0554] The bispecific antigen binding molecule or antibody of the invention will generally be used in an amount effective to achieve the intended purpose. For use to treat or prevent a disease condition, the bispecific antigen binding molecule or antibody of the invention, or pharmaceutical compositions thereof, are administered or applied in a therapeutically effective amount. Determination of a therapeutically effective amount is well within the capabilities of those skilled in the art, especially in light of the detailed disclosure provided herein.

[0555] For systemic administration, a therapeutically effective dose can be estimated initially from in vitro assays, such as cell culture assays. A dose can then be formulated in animal models to achieve a circulating concentration range that includes the IC₅₀ as determined in cell culture. Such information can be used to more accurately determine useful doses in humans.

[0556] Initial dosages can also be estimated from in vivo data, e g, animal models, using techniques that are well known in the art. One having ordinary skill in the art could readily optimize administration to humans based on animal data.

[0557] Dosage amount and interval may be adjusted individually to provide plasma levels of the bispecific antigen binding molecule or antibody of the invention which are sufficient to maintain therapeutic effect. Usual patient dosages for administration by injection range from about 0.1 to 50 mg/kg/day, typically from about 0.5 to 1 mg/kg/day. Therapeutically effective plasma levels may be achieved by administering multiple doses each day. Levels in plasma may be measured, for example, by HPLC.

[0558] In cases of local administration or selective uptake, the effective local concentration of the bispecific antigen binding molecule or antibody of the invention may not be related to plasma concentration. One skilled in the art will be able to optimize therapeutically effective local dosages without undue experimentation.

[0559] A therapeutically effective dose of the bispecific antigen binding molecule or antibody of the invention described herein will generally provide therapeutic benefit without causing substantial toxicity. Toxicity and therapeutic efficacy of a fusion protein can be determined by standard pharmaceutical procedures in cell culture or experimental animals. Cell culture assays and animal studies can be used to determine the LD₅₀ (the dose lethal to 50% of a population) and the ED₅₀ (the dose therapeutically effective in 50% of a population). The dose ratio between toxic and therapeutic effects is the therapeutic index, which can be expressed as the ratio LD₅₀/ED₅₀. Bispecific antigen binding molecules that exhibit large therapeutic indices are preferred. In one aspect, the bispecific antigen binding molecule or antibody of the invention exhibits a high therapeutic index. The data obtained from cell culture assays and animal studies can be used in formulating a range of dosages suitable for use in humans. The dosage lies preferably within a range of circulating concentrations that include the ED50 with little or no toxicity. The dosage may vary within this range depending upon a variety of factors, e.g., the dosage form employed, the route of administration utilized, the condition of the subject, and the like. The exact formulation, route of administration and dosage can be chosen by the individual physician in view of the patient's condition (see, e.g., Fingl et al., 1975, in: The Pharmacological Basis of Therapeutics, Ch. 1, p. 1, incorporated herein by reference in its entirety).

[0560] The attending physician for patients treated with fusion proteins of the invention would know how and when to terminate, interrupt, or adjust administration due to toxicity, organ dysfunction, and the like. Conversely, the attending physician would also know to adjust treatment to higher levels if the clinical response were not adequate (precluding toxicity). The magnitude of an administered dose in the management of the disorder of interest will vary with the severity of the condition to be treated, with the route of administration, and the like. The severity of the condition may, for example, be evaluated, in part, by standard prognostic evaluation methods. Further, the dose and perhaps dose frequency will also vary according to the age, body weight, and response of the individual patient.

[0561] Other Agents and Treatments

[0562] The bispecific antigen binding molecule or antibody of the invention may be administered in combination with one or more other agents in therapy. For instance, the bispecific antigen binding molecule or antibody of the invention of the invention may be co-administered with at least one additional therapeutic agent. The term “therapeutic agent” encompasses any agent that can be administered for treating a symptom or disease in an individual in need of such treatment. Such additional therapeutic agent may comprise any active ingredients suitable for the particular indication being treated, preferably those with complementary activities that do not adversely affect each other. In certain embodiments, an additional therapeutic agent is another anti-cancer agent.

[0563] Such other agents are suitably present in combination in amounts that are effective for the purpose intended. The effective amount of such other agents depends on the amount of fusion protein used, the type of disorder or treatment, and other factors discussed above. The bispecific antigen binding molecule or antibody of the invention are generally used in the same dosages and with administration routes as described herein, or about from 1 to 99% of the dosages described herein, or in any dosage and by any route that is empirically/clinically determined to be appropriate.

[0564] Such combination therapies noted above encompass combined administration (where two or more therapeutic agents are included in the same or separate compositions), and separate administration, in which case, administration of the bispecific antigen binding molecule or antibody of the invention can occur prior to, simultaneously, and/or following, administration of the additional therapeutic agent and/or adjuvant.

[0565] Articles of Manufacture

[0566] In another aspect of the invention, an article of manufacture containing materials useful for the treatment, prevention and/or diagnosis of the disorders described above is provided. The article of manufacture comprises a container and a label or package insert on or associated with the container. Suitable containers include, for example, bottles, vials, syringes, IV solution bags, etc. The containers may be formed from a variety of materials such as glass or plastic. The container holds a composition which is by itself or combined with another composition effective for treating, preventing and/or diagnosing the condition and may have a sterile access port (for example the container may be an intravenous solution bag or a vial having a stopper that is pierceable by a hypodermic injection needle). At least one active agent in the composition is a bispecific antigen binding molecule or antibody of the invention.

[0567] The label or package insert indicates that the composition is used for treating the condition of choice. Moreover, the article of manufacture may comprise (a) a first container with a composition contained therein, wherein the composition comprises a bispecific antigen binding molecule of the invention; and (b) a second container with a composition contained therein, wherein the composition comprises a further cytotoxic or otherwise therapeutic agent. The article of manufacture in this embodiment of the invention may further comprise a package insert indicating that the compositions can be used to treat a particular condition.

[0568] Alternatively, or additionally, the article of manufacture may further comprise a second (or third) container comprising a pharmaceutically-acceptable buffer, such as bacteriostatic water for injection (BWFI), phosphate-buffered saline, Ringer's solution and dextrose solution. It may further include other materials desirable from a commercial and user standpoint, including other buffers, diluents, filters, needles, and syringes.

TABLE C
(Sequences):

| SEQ | | |
|---|---|---|
| ID | | |
| NO: | Name | Sequence |
| 1 | Human OX40 ECD | Uniprot No. P43489, aa 29-214 |
| 2 | OX40(8H9, 49B4, 1G4, | SYAIS |
| | 20B7) CDR-H1 | |
| 3 | OX40(CLC-563, CLC-564, | SYAMS |
| | 17A9) CDR-H1 | |
| 4 | OX40(8H9, 49B4, 1G4, | GIIPIFGTANYAQKFQG |
| | 20B7) CDR-H2 | |
| 5 | OX40(CLC-563, CLC-564, | AISGSGGSTYYADSVKG |
| | 17A9) CDR-H2 | |
| 6 | OX40(8H9) CDR-H3 | EYGWMDY |
| 7 | OX40(49B4) CDR-H3 | EYYRGPYDY |
| 8 | OX40(1G4) CDR-H3 | EYGSMDY |
| 9 | OX40(20B7) CDR-H3 | VNYPYSYWGDFDY |
| 10 | OX40(CLC-563) CDR-H3 | DVGAFDY |
| 11 | OX40(CLC-564) CDR-H3 | DVGPFDY |
| 12 | OX40(17A9)-CDR-H3 | VFYRGGVSMDY |
| 13 | OX40(8H9, 49B4, 1G4, | RASQSISSWLA |
| | 20B7) CDR-L1 | |
| 14 | OX40(CLC-563, CLC564) | RASQSVSSSYLA |
| | CDR-L1 | |
| 15 | OX40(17A9) CDR-L1 | QGDSLRSYYAS |
| 16 | OX40(8H9,49B4,1G4, | DASSLES |
| | 20B7) CDR-L2 | |
| 17 | OX40(CLC-563, CLC564) | GASSRAT |
| | CDR-L2 | |
| 18 | OX40(17A9) CDR-L2 | GKNNRPS |
| 19 | OX40(8H9) CDR-L3 | QQYLTYSRFT |
| 20 | OX40(49B4) CDR-L3 | QQYSSQPYT |
| 21 | OX40(1G4) CDR-L3 | QQYISYSMLT |
| 22 | OX40(20B7) CDR-L3 | QQYQAFSLT |
| 23 | OX40(CLC-563, CLC-564) | QQYGSSPLT |
| | CDR-L3 | |
| 24 | OX40(17A9) CDR-L3 | NSRVMPHNRV |
| 25 | OX40(8H9) VH | QVQLVQSGAEVKKPGSSVKVSCKASGGTFSSYAIS |
| | | WVRQAPGQGLEWMGGIIPIFGTANYAQKFQGRVT |
| | | ITADKSTSTAYMELSSLRSEDTAVYYCAREYGWM |
| | | DYWGQGTTVTVSS |
| 26 | OX40(8H9) VL | DIQMTQSPSTLSASVGDRVTITCRASQSISSWLAW |
| | | YQQKPGKAPKLLIYDASSLESGVPSRFSGSGSGTEF |
| | | TLTISSLQPDDFATYYCQQYLTYSRFTFGQGTKVEIK |
| 27 | OX40(49B4) VH | QVQLVQSGAEVKKPGSSVKVSCKASGGTFSSYAIS |
| | | WVRQAPGQGLEWMGGIIPIFGTANYAQKFQGRVT |
| | | ITADKSTSTAYMELSSLRSEDTAVYYCAREYYRGP |
| | | YDYWGQGTTVTVSS |
| 28 | OX40(49B4) VL | DIQMTQSPSTLSASVGDRVTITCRASQSISSWLAW |
| | | YQQKPGKAPKLLIYDASSLESGVPSRFSGSGSGTEF |
| | | TLTISSLQPDDFATYYCQQYSSQPYTFGQGTKVEIK |
| 29 | OX40(1G4) VH | QVQLVQSGAEVKKPGSSVKVSCKASGGTFSSYAIS |
| | | WVRQAPGQGLEWMGGIIPIFGTANYAQKFQGRVT |
| | | ITADKSTSTAYMELSSLRSEDTAVYYCAREYGSMD |
| | | YWGQGTTVTVSS |
| 30 | OX40(1G4) VL | DIQMTQSPSTLSASVGDRVTITCRASQSISSWLAW |
| | | YQQKPGKAPKLLIYDASSLESGVPSRFSGSGSGTEF |
| | | TLTISSLQPDDFATYYCQQYISYSMLTFGQGTKVEIK |
| 31 | OX40(20B7) VH | QVQLVQSGAEVKKPGSSVKVSCKASGGTFSSYAIS |
| | | WVRQAPGQGLEWMGGIIPIFGTANYAQKFQGRVT |
| | | ITADKSTSTAYMELSSLRSEDTAVYYCARVNYPYS |
| | | YWGDFDYWGQGTTVTVSS |
| 32 | OX40(20B7) VL | DIQMTQSPSTLSASVGDRVTITCRASQSISSWLAW |
| | | YQQKPGKAPKLLIYDASSLESGVPSRFSGSGSGTEF |
| | | TLTISSLQPDDFATYYCQQYQAFSLTFGQGTKVEIK |
| 33 | OX40(CLC-563) VH | EVQLLESGGGLVQPGGSLRLSCAASGFTFSSYAMS |
| | | WVRQAPGKGLEWVSAISGSGGSTYYADSVKGRFT |
| | | ISRDNSKNTLYLQMNSLRAEDTAVYYCALDVGAF |
| | | DYWGQGALVTVSS |
| 34 | OX40(CLC-563) VL | EIVLTQSPGTLSLSPGERATLSCRASQSVSSSYLAW |
| | | YQQKPGQAPRLLIYGASSRATGIPDRFSGSGSGTDF |
| | | TLTISRLEPEDFAVYYCQQYGSSPLTFGQGTKVEIK |
| 35 | OX40(CLC-564) VH | EVQLLESGGGLVQPGGSLRLSCAASGFTFSSYAMS |
| | | WVRQAPGKGLEWVSAISGSGGSTYYADSVKGRFT |
| | | ISRDNSKNTLYLQMNSLRAEDTAVYYCAFDVGPF |
| | | DYWGQGTLVTVSS |
| 36 | OX40(CLC-564) VL | EIVLTQSPGTLSLSPGERATLSCRASQSVSSSYLAW |
| | | YQQKPGQAPRLLIYGASSRATGIPDRFSGSGSGTDF |
| | | TLTISRLEPEDFAVYYCQQYGSSPLTFGQGTKVEIK |
| 37 | OX40(17A9) VH | EVQLLESGGGLVQPGGSLRLSCAASGFTFSSYAMS |
| | | WVRQAPGKGLEWVSAISGSGGSTYYADSVKGRFT |
| | | ISRDNSKNTLYLQMNSLRAEDTAVYYCARVFYRG |
| | | GVSMDYWGQGTLVTVSS |
| 38 | OX40(17A9) VL | SSELTQDPAVSVALGQTVRITCQGDSLRSYYASWY |
| | | QQKPGQAPVLVIYGKNNRPSGIPDRFSGSSSGNTAS |
| | | LTITGAQAEDEADYYCNSRVMPHNRVFGGGTKLTV |
| 39 | FAP(28H1) CDR-H1 | SHAMS |
| 40 | FAP(4B9) CDR-H1 | SYAMS |
| 41 | FAP(28H1) CDR-H2 | AIWASGEQYYADSVKG |
| 42 | FAP(4B9) CDR-H2 | AIIGSGASTYYADSVKG |
| 43 | FAP(28H1) CDR-H3 | GWLGNFDY |
| 44 | FAP(4B9) CDR-H3 | GWFGGFNY |
| 45 | FAP(28H1) CDR-L1 | RASQSVSRSYLA |
| 46 | FAP(4B9) CDR-L1 | RASQSVTSSYLA |
| 47 | FAP(28H1) CDR-L2 | GASTRAT |
| 48 | FAP(4B9) CDR-L2 | VGSRRAT |
| 49 | FAP(28H1) CDR-L3 | QQGQVIPPT |
| 50 | FAP(4B9) CDR-L3 | QQGIMLPPT |
| 51 | FAP(28H1) VH | EVQLLESGGGLVQPGGSLRLSCAASGFTFSSHAMS |
| | | WVRQAPGKGLEWVSAIWASGEQYYADSVKGRFTI |
| | | SRDNSKNTLYLQMNSLRAEDTAVYYCAKGWLGN |
| | | FDYWGQGTLVTVSS |
| 52 | FAP(28H1) VL | EIVLTQSPGTLSLSPGERATLSCRASQSVSRSYLAW |
| | | YQQKPGQAPRLLIIGASTRATGIPDRFSGSGSGTDF |
| | | TLTISRLEPEDFAVYYCQQGQVIPPTFGQGTKVEIK |
| 53 | FAP(4B9) VH | EVQLLESGGGLVQPGGSLRLSCAASGFTFSSYAMS |
| | | WVRQAPGKGLEWVSAIIGSGASTYYADSVKGRFTI |
| | | SRDNSKNTLYLQMNSLRAEDTAVYYCAKGWFGG |
| | | FNYWGQGTLVTVSS |
| 54 | FAP(4B9) VL | EIVLTQSPGTLSLSPGERATLSCRASQSVTSSYLAW |
| | | YQQKPGQAPRLLINVGSRRATGIPDRFSGSGSGTDF |
| | | TLTISRLEPEDFAVYYCQQGIMLPPTFGQGTKVEIK |
| 55 | Human (hu) FAP | UniProt no. Q12884 760 AA |
| 56 | hu FAP ectodomain + poly- | RPSRVHNSEENTMRALTLKDILNGTFSYKTFFPNW |
| | lys-tag + his₆-tag | ISGQEYLHQSADNNIVLYNIETGQSYTILSNRTMKS |
| | | VNASNYGLSPDRQFVYLESDYSKLWRYSYTATYY |
| | | IYDLSNGEFVRGNELPRPIQYLCWSPVGSKLAYVY |
| | | QNNIYLKQRPGDPPFQITFNGRENKIFNGIPDWVYE |
| | | EEMLATKYALWWSPNGKFLAYAEFNDTDIPVIAY |
| | | SYYGDEQYPRTINIPYPKAGAKNPVVRIFIIDTTYPA |
| | | YVGPQEVPVPAMIASSDYYFSWLTWVTDERVCLQ |
| | | WLKRVQNVSVLSICDFREDWQTWDCPKTQEHIEE |
| | | SRTGWAGGFFVSTPVFSYDAISYYKIFSDKDGYKH |
| | | IHYIKDTVENAIQITSGKWEAINIFRVTQDSLFYSSN |
| | | EFEEYPGRRNIYRISIGSYPPSKKCVTCHLRKERCQ |
| | | YYTASFSDYAKYYALVCYGPGIPISTLHDGRTDQEI |
| | | KILEENKELENALKNIQLPKEEIKKLEVDEITLWYK |
| | | MILPPQFDRSKKYPLLIQVYGGPCSQSVRSVFAVN |
| | | WISYLASKEGMVIALVDGRGTAFQGDKLLYAVYR |
| | | KLGVYEVEDQITAVRKFIEMGFIDEKRIAIWGWSY |
| | | GGYVSSLALASGTGLFKCGIAVAPVSSWEYYASV |
| | | YTERFMGLPTKDDNLEHYKNSTVMARAEYFRNV |
| | | DYLLIHGTADDNVHFQNSAQIAKALVNAQVDFQA |
| | | MWYSDQNHGLSGLSTNHLYTHMTHFLKQCFSLSD |
| | | GKKKKKKGHHHHHH |
| 57 | nucleotide sequence | CGCCCTTCAAGAGTTCATAACTCTGAAGAAAAT |
| | hu FAP ectodomain + poly- | ACAATGAGAGCACTCACACTGAAGGATATTTTA |
| | lys-tag + his₆-tag | AATG |
| | | GAACATTTTCTTATAAAACATTTTTTCCAAACTG |
| | | GATTTCAGGACAAGAATATCTTCATCAATCTGCA |
| | | GATAACAATATAGTACTTTATAATATTGAAACA |
| | | GGACAATCATATACCATTTTGAGTAATAGAACC |
| | | ATGAAAAGTGTGAATGCTTCAAATTACGGCTTA |
| | | TCACCTGATCGGCAATTTGTATATCTAGAAAGTG |
| | | ATTATTCAAAGCTTTGGAGATACTCTTACACAGC |
| | | AACATATTACATCTATGACCTTAGCAATGGAGA |
| | | ATTTGTAAGAGGAAATGAGCTTCCTCGTCCAATT |
| | | CAGTATTTATGCTGGTCGCCTGTTGGGAGTAAAT |
| | | TAGCATATGTCTATCAAAACAATATCTATTTGAA |
| | | ACAAAGACCAGGAGATCCACCTTTTCAAATAAC |
| | | ATTTAATGGAAGAGAAAATAAAATATTTAATGG |
| | | AATCCCAGACTGGGTTTATGAAGAGGAAATGCT |
| | | TGCTACAAAATATGCTCTCTGGTGGTCTCCTAAT |
| | | GGAAAATTTTTGGCATATGCGGAATTTAATGAT |
| | | ACGGATATACCAGTTATTGCCTATTCCTATTATG |
| | | GCGATGAACAATATCCTAGAACAATAAATATTC |
| | | CATACCCAAAGGCTGGAGCTAAGAATCCCGTTG |
| | | TTCGGATATTTATTATCGATACCACTTACCCTGC |
| | | GTATGTAGGTCCCCAGGAAGTGCCTGTTCCAGC |
| | | AATGATAGCCTCAAGTGATTATTATTTCAGTTGG |
| | | CTCACGTGGGTTACTGATGAACGAGTATGTTTGC |
| | | AGTGGCTAAAAAGAGTCCAGAATGTTTCGGTCC |
| | | TGTCTATATGTGACTTCAGGGAAGACTGGCAGA |
| | | CATGGGATTGTCCAAAGACCCAGGAGCATATAG |
| | | AAGAAAGCAGAACTGGATGGGCTGGTGGATTCT |
| | | TTGTTTCAACACCAGTTTTCAGCTATGATGCCAT |
| | | TTCGTACTACAAAATATTTAGTGACAAGGATGG |
| | | CTACAAACATATTCACTATATCAAAGACACTGT |
| | | GGAAAATGCTATTCAAATTACAAGTGGCAAGTG |
| | | GGAGGCCATAAATATATTCAGAGTAACACAGGA |
| | | TTCACTGTTTTATTCTAGCAATGAATTTGAAGAA |
| | | TACCCTGGAAGAAGAAACATCTACAGAATTAGC |
| | | ATTGGAAGCTATCCTCCAAGCAAGAAGTGTGTT |
| | | ACTTGCCATCTAAGGAAAGAAAGGTGCCAATAT |
| | | TACACAGCAAGTTTCAGCGACTACGCCAAGTAC |
| | | TATGCACTTGTCTGCTACGGCCCAGGCATCCCCA |
| | | TTTCCACCCTTCATGATGGACGCACTGATCAAGA |
| | | AATTAAAATCCTGGAAGAAAACAAGGAATTGGA |
| | | AAATGCTTTGAAAAATATCCAGCTGCCTAAAGA |
| | | GGAAATTAAGAAACTTGAAGTAGATGAAATTAC |
| | | TTTATGGTACAAGATGATTCTTCCTCCTCAATTT |
| | | GACAGATCAAAGAAGTATCCCTTGCTAATTCAA |
| | | GTGTATGGTGGTCCCTGCAGTCAGAGTGTAAGG |
| | | TCTGTATTTGCTGTTAATTGGATATCTTATCTTGC |
| | | AAGTAAGGAAGGGATGGTCATTGCCTTGGTGGA |
| | | TGGTCGAGGAACAGCTTTCCAAGGTGACAAACT |
| | | CCTCTATGCAGTGTATCGAAAGCTGGGTGTTTAT |
| | | GAAGTTGAAGACCAGATTACAGCTGTCAGAAAA |
| | | TTCATAGAAATGGGTTTCATTGATGAAAAAAGA |
| | | ATAGCCATATGGGGCTGGTCCTATGGAGGATAC |
| | | GTTTCATCACTGGCCCTTGCATCTGGAACTGGTC |
| | | TTTTCAAATGTGGTATAGCAGTGGCTCCAGTCTC |
| | | CAGCTGGGAATATTACGCGTCTGTCTACACAGA |
| | | GAGATTCATGGGTCTCCCAACAAAGGATGATAA |
| | | TCTTGAGCACTATAAGAATTCAACTGTGATGGC |
| | | AAGAGCAGAATATTTCAGAAATGTAGACTATCT |
| | | TCTCATCCACGGAACAGCAGATGATAATGTGCA |
| | | CTTTCAAAACTCAGCACAGATTGCTAAAGCTCTG |
| | | GTTAATGCACAAGTGGATTTCCAGGCAATGTGG |
| | | TACTCTGACCAGAACCACGGCTTATCCGGCCTGT |
| | | CCACGAACCACTTATACACCCACATGACCCACTT |
| | | CCTAAAGCAGTGTTTCTCTTTGTCAGACGGCAAA |
| | | AAGAAAAAGAAAAAGGGCCACCACCATCACCA |
| | | TCAC |
| 58 | mouse FAP | UniProt no. P97321 761 AA |
| 59 | Murine FAP | RPSRVYKPEGNTKRALTLKDILNGTFSYKTYFPNW |
| | ectodomain + poly-lys- | ISEQEYLHQSEDDNIVFYNIETRESYIILSNSTMKSV |
| | tag + his₆-tag | NATDYGLSPDRQFVYLESDYSKLWRYSYTATYYI |
| | | YDLQNGEFVRGYELPRPIQYLCWSPVGSKLAYVY |
| | | QNNIYLKQRPGDPPFQITYTGRENRIFNGIPDWVYE |
| | | EEMLATKYALWWSPDGKFLAYVEFNDSDIPIIAYS |
| | | YYGDGQYPRTINIPYPKAGAKNPVVRVFIVDTTYP |
| | | HHVGPMEVPVPEMIASSDYYFSWLTWVSSERVCL |
| | | QWLKRVQNVSVLSICDFREDWHAWECPKNQEHV |
| | | EESRTGWAGGFFVSTPAFSQDATSYYKIFSDKDGY |
| | | KHIHYIKDTVENAIQITSGKWEAIYIFRVTQDSLFYS |
| | | SNEFEGYPGRRNIYRISIGNSPPSKKCVTCHLRKER |
| | | CQYYTASFSYKAKYYALVCYGPGLPISTLHDGRTD |
| | | QEIQVLEENKELENSLRNIQLPKVEIKKLKDGGLTF |
| | | WYKMILPPQFDRSKKYPLLIQVYGGPCSQSVKSVF |
| | | AVNWITYLASKEGIVIALVDGRGTAFQGDKFLHA |
| | | VYRKLGVYEVEDQLTAVRKFIEMGFIDEERIAIWG |
| | | WSYGGYVSSLALASGTGLFKCGIAVAPVSSWEYY |
| | | ASIYSERFMGLPTKDDNLEHYKNSTVMARAEYFR |
| | | NVDYLLIHGTADDNVHFQNSAQIAKALVNAQVDF |
| | | QAMWYSDQNHGILSGRSQNHLYTHMTHFLKQCFS |
| | | LSDGKKKKKKGHHHHHH |
| 60 | nucleotide sequence | CGTCCCTCAAGAGTTTACAAACCTGAAGGAAAC |
| | Murine FAP | ACAAAGAGAGCTCTTACCTTGAAGGATATTTTA |
| | ectodomain + poly-lys- | AATG |
| | tag + his₆-tag | GAACATTCTCATATAAAACATATTTTCCCAACTG |
| | | GATTTCAGAACAAGAATATCTTCATCAATCTGA |
| | | GGATGATAACATAGTATTTTATAATATTGAAAC |
| | | AAGAGAATCATATATCATTTTGAGTAATAGCAC |
| | | CATGAAAAGTGTGAATGCTACAGATTATGGTTT |
| | | GTCACCTGATCGGCAATTTGTGTATCTAGAAAGT |
| | | GATTATTCAAAGCTCTGGCGATATTCATACACAG |
| | | CGACATACTACATCTACGACCTTCAGAATGGGG |
| | | AATTTGTAAGAGG |
| | | ATACGAGCTCCCTCGTCCAATTCAGTATCTATGC |
| | | TGGTCGCCTGTTGGGAGTAAATTAGCATATGTAT |
| | | ATCAAAACAATATTTATTTGAAACAAAGACCAG |
| | | GAGATCCACCTTTTCAAATAACTTATACTGGAAG |
| | | AGAAAATAGAATATTTAATGGAATACCAGACTG |
| | | GGTTTATGAAGAGGAAATGCTTGCCACAAAATA |
| | | TGCTCTTTGGTGGTCTCCAGATGGAAAATTTTTG |
| | | GCATATGTAGAATTTAATGATTCAGATATACCA |
| | | ATTATTGCCTATTCTTATTATGGTGATGGACAGT |
| | | ATCCTAGAACTATAAATATTCCATATCCAAAGG |
| | | CTGGGGCTAAGAATCCGGTTGTTCGTGTTTTTAT |
| | | TGTTGACACCACCTACCCTCACCACGTGGGCCCA |
| | | ATGGAAGTGCCAGTTCCAGAAATGATAGCCTCA |
| | | AGTGACTATTATTTCAGCTGGCTCACATGGGTGT |
| | | CCAGTGAACGAGTATGCTTGCAGTGGCTAAAAA |
| | | GAGTGCAGAATGTCTCAGTCCTGTCTATATGTGA |
| | | TTTCAGGGAAGACTGGCATGCATGGGAATGTCC |
| | | AAAGAACCAGGAGCATGTAGAAGAAAGCAGAA |
| | | CAGGATGGGCTGGTGGATTCTTTGTTTCGACACC |
| | | AGCTTTTAGCCAGGATGCCACTTCTTACTACAAA |
| | | ATATTTAGCGACAAGGATGGTTACAAACATATT |
| | | CACTACATCAAAGACACTGTGGAAAATGCTATT |
| | | CAAATTACAAGTGGCAAGTGGGAGGCCATATAT |
| | | ATATTCCGCGTAACACAGGATTCACTGTTTTATT |
| | | CTAGCAATGAATTTGAAGGTTACCCTGGAAGAA |
| | | GAAACATCTACAGAATTAGCATTGGAAACTCTC |
| | | CTCCGAGCAAGAAGTGTGTTACTTGCCATCTAA |
| | | GGAAAGAAAGGTGCCAATATTACACAGCAAGTT |
| | | TCAGCTACAAAGCCAAGTACTATGCACTCGTCT |
| | | GCTATGGCCCTGGCCTCCCCATTTCCACCCTCCA |
| | | TGATGGCCGCACAGACCAAGAAATACAAGTATT |
| | | AGAAGAAAACAAAGAACTGGAAAATTCTCTGAG |
| | | AAATATCCAGCTGCCTAAAGTGGAGATTAAGAA |
| | | GCTCAAAGACGGGGGACTGACTTTCTGGTACAA |
| | | GATGATTCTGCCTCCTCAGTTTGACAGATCAAAG |
| | | AAGTACCCTTTGCTAATTCAAGTGTATGGTGGTC |
| | | CTTGTAGCCAGAGTGTTAAGTCTGTGTTTGCTGT |
| | | TAATTGGATAACTTATCTCGCAAGTAAGGAGGG |
| | | GATAGTCATTGCCCTGGTAGATGGTCGGGGCAC |
| | | TGCTTTCCAAGGTGACAAATTCCTGCATGCCGTG |
| | | TATCGAAAACTGGGTGTATATGAAGTTGAGGAC |
| | | CAGCTCACAGCTGTCAGAAAATTCATAGAAATG |
| | | GGTTTCATTGATGAAGAAAGAATAGCCATATGG |
| | | GGCTGGTCCTACGGAGGTTATGTTTCATCCCTGG |
| | | CCCTTGCATCTGGAACTGGTCTTTTCAAATGTGG |
| | | CATAGCAGTGGCTCCAGTCTCCAGCTGGGAATA |
| | | TTACGCATCTATCTACTCAGAGAGATTCATGGGC |
| | | CTCCCAACAAAGGACGACAATCTCGAACACTAT |
| | | AAAAATTCAACTGTGATGGCAAGAGCAGAATAT |
| | | TTCAGAAATGTAGACTATCTTCTCATCCACGGAA |
| | | CAGCAGATGATAATGTGCACTTTCAGAACTCAG |
| | | CACAGATTGCTAAAGCTTTGGTTAATGCACAAG |
| | | TGGATTTCCAGGCGATGTGGTACTCTGACCAGA |
| | | ACCATGGTATATTATCTGGGCGCTCCCAGAATCA |
| | | TTTATATACCCACATGACGCACTTCCTCAAGCAA |
| | | TGCTTTTCTTTATCAGACGGCAAAAAGAAAAAG |
| | | AAAAAGGGCCACCACCATCACCATCAC |
| 61 | Cynomolgus FAP | RPPRVHNSEENTMRALTLKDILNGTFSYKTFFPNW |
| | ectodomain + poly-lys- | ISGQEYLHQSADNNIVLYNIETGQSYTILSNRTMKS |
| | tag + his₆-tag | VNASNYGLSPDRQFVYLESDYSKLWRYSYTATYY |
| | | IYDLSNGEFVRGNELPRPIQYLCWSPVGSKLAYVY |
| | | QNNIYLKQRPGDPPFQITFNGRENKIFNGIPDWVYE |
| | | EEMLATKYALWWSPNGKFLAYAEFNDTDIPVIAY |
| | | SYYGDEQYPRTINIPYPKAGAKNPFVRIFIIDTTYPA |
| | | YVGPQEVPVPAMIASSDYYFSWLTWVTDERVCLQ |
| | | WLKRVQNVSVLSICDFREDWQTWDCPKTQEHIEE |
| | | SRTGWAGGFFVSTPVFSYDAISYYKIFSDKDGYKH |
| | | IHYIKDTVENAIQITSGKWEAINIFRVTQDSLFYSSN |
| | | EFEDYPGRRNIYRISIGSYPPSKKCVTCHLRKERCQ |
| | | YYTASFSDYAKYYALVCYGPGIPISTLHDGRTDQEI |
| | | KILEENKELENALKNIQLPKEEIKKLEVDEITLWYK |
| | | MILPPQFDRSKKYPLLIQVYGGPCSQSVRSVFAVN |
| | | WISYLASKEGMVIALVDGRGTAFQGDKLLYAVYR |
| | | KLGVYEVEDQITAVRKFIEMGFIDEKRIAIWGWSY |
| | | GGYVSSLALASGTGLFKCGIAVAPVSSWEYYASV |
| | | YTERFMGLPTKDDNLEHYKNSTVMARAEYFRNV |
| | | DYLLIHGTADDNVHFQNSAQIAKALVNAQVDFQA |
| | | MWYSDQNHGLSGLSTNHLYTHMTHFLKQCFSLSD |
| | | GKKKKKKGHHHHHH |
| 62 | nucleotide sequence | CGCCCTCCAAGAGTTCATAACTCTGAAGAAAAT |
| | Cynomolgus FAP | ACAATGAGAGCACTCACACTGAAGGATATTTTA |
| | ectodomain + poly-lys- | AATG |
| | tag + his₆-tag | GGACATTTTCTTATAAAACATTTTTTCCAAACTG |
| | | GATTTCAGGACAAGAATATCTTCATCAATCTGCA |
| | | GATAACAATATAGTACTTTATAATATTGAAACA |
| | | GGACAATCATATACCATTTTGAGTAACAGAACC |
| | | ATGAAAAGTGTGAATGCTTCAAATTATGGCTTAT |
| | | CACCTGATCGGCAATTTGTATATCTAGAAAGTG |
| | | ATTATTCAAAGCTTTGGAGATACTCTTACACAGC |
| | | AACATATTACATCTATGACCTTAGCAATGGAGA |
| | | ATTTGTAAGAGGAAATGAGCTTCCTCGTCCAATT |
| | | CAGTATTTATGCTGGTCGCCTGTTGGGAGTAAAT |
| | | TAGCATATGTCTATCAAAACAATATCTATTTGAA |
| | | ACAAAGACCAGGAGATCCACCTTTTCAAATAAC |
| | | ATTTAATGGAAGAGAAAATAAAATATTTAATGG |
| | | AATCCCAGACTGGGTTTATGAAGAGGAAATGCT |
| | | TGCTACAAAATATGCTCTCTGGTGGTCTCCTAAT |
| | | GGAAAATTTTTGGCATATGCGGAATTTAATGAT |
| | | ACAGATATACCAGTTATTGCCTATTCCTATTATG |
| | | GCGATGAACAATATCCCAGAACAATAAATATTC |
| | | CATACCCAAAGGCCGGAGCTAAGAATCCTTTTG |
| | | TTCGGATATTTATTATCGATACCACTTACCCTGC |
| | | GTATGTAGGTCCCCAGGAAGTGCCTGTTCCAGC |
| | | AATGATAGCCTCAAGTGATTATTATTTCAGTTGG |
| | | CTCACGTGGGTTACTGATGAACGAGTATGTTTGC |
| | | AGTGGCTAAAAAGAGTCCAGAATGTTTCGGTCT |
| | | TGTCTATATGTGATTTCAGGGAAGACTGGCAGA |
| | | CATGGGATTGTCCAAAGACCCAGGAGCATATAG |
| | | AAGAAAGCAGAACTGGATGGGCTGGTGGATTCT |
| | | TTGTTTCAACACCAGTTTTCAGCTATGATGCCAT |
| | | TTCATACTACAAAATATTTAGTGACAAGGATGG |
| | | CTACAAACATATTCACTATATCAAAGACACTGT |
| | | GGAAAATGCTATTCAAATTACAAGTGGCAAGTG |
| | | GGAGGCCATAAATATATTCAGAGTAACACAGGA |
| | | TTCACTGTTTTATTCTAGCAATGAATTTGAAGAT |
| | | TACCCTGGAAGAAGAAACATCTACAGAATTAGC |
| | | ATTGGAAGCTATCCTCCAAGCAAGAAGTGTGTT |
| | | ACTTGCCATCTAAGGAAAGAAAGGTGCCAATAT |
| | | TACACAGCAAGTTTCAGCGACTACGCCAAGTAC |
| | | TATGCACTTGTCTGCTATGGCCCAGGCATCCCCA |
| | | TTTCCACCCTTCATGACGGACGCACTGATCAAGA |
| | | AATTAAAATCCTGGAAGAAAACAAGGAATTGGA |
| | | AAATGCTTTGAAAAATATCCAGCTGCCTAAAGA |
| | | GGAAATTAAGAAACTTGAAGTAGATGAAATTAC |
| | | TTTATGGTACAAGATGATTCTTCCTCCTCAATTT |
| | | GACAGATCAAAGAAGTATCCCTTGCTAATTCAA |
| | | GTGTATGGTGGTCCCTGCAGTCAGAGTGTAAGG |
| | | TCTGTATTTGCTGTTAATTGGATATCTTATCTTGC |
| | | AAGTAAGGAAGGGATGGTCATTGCCTTGGTGGA |
| | | TGGTCGGGGAACAGCTTTCCAAGGTGACAAACT |
| | | CCTGTATGCAGTGTATCGAAAGCTGGGTGTTTAT |
| | | GAAGTTGAAGACCAGATTACAGCTGTCAGAAAA |
| | | TTCATAGAAATGGGTTTCATTGATGAAAAAAGA |
| | | ATAGCCATATGGGGCTGGTCCTATGGAGGATAT |
| | | GTTTCATCACTGGCCCTTGCATCTGGAACTGGTC |
| | | TTTTCAAATGTGGGATAGCAGTGGCTCCAGTCTC |
| | | CAGCTGGGAATATTACGCGTCTGTCTACACAGA |
| | | GAGATTCATGGGTCTCCCAACAAAGGATGATAA |
| | | TCTTGAGCACTATAAGAATTCAACTGTGATGGC |
| | | AAGAGCAGAATATTTCAGAAATGTAGACTATCT |
| | | TCTCATCCACGGAACAGCAGATGATAATGTGCA |
| | | CTTTCAAAACTCAGCACAGATTGCTAAAGCTCTG |
| | | GTTAATGCACAAGTGGATTTCCAGGCAATGTGG |
| | | TACTCTGACCAGAACCACGGCTTATCCGGCCTGT |
| | | CCACGAACCACTTATACACCCACATGACCCACTT |
| | | CCTAAAGCAGTGTTTCTCTTTGTCAGACGGCAAA |
| | | AAGAAAAAGAAAAAGGGCCACCACCATCACCA |
| | | TCAC |
| 63 | human CEA | UniProt no. P06731, 702 AA |
| 64 | human MCSP | UniProt no. Q6UVK1, 2322 AA |
| 65 | human EGFR | UniProt no. P00533, 1210AA |
| 66 | human CD19 | UniProt no. P15391, 556AA |
| 67 | human CD20 | Uniprot no. P11836, 297AA |
| 68 | human CD33 | UniProt no. P20138, 364AA |
| 69 | human OX40 | UniProt no. P43489, 277AA |
| 70 | human 4-1BB | UniProt no. Q07011, 255AA |
| 71 | human CD27 | UniProt no. P26842, 260AA |
| 72 | human HVEM | UniProt no. Q92956, 283AA |
| 73 | human CD30 | UniProt no. P28908, 595AA |
| 74 | human GITR | UniProt no. Q9Y5U5, 241AA |
| 75 | murine OX40 | UniProt no. P47741, 272AA |
| 76 | murine 4-1BB | UniProt no. P20334, 256AA |
| 77 | cynomolgus 4-1BB | Uniprot no. F6W5G6, 254AA |
| 78 | Peptide linker (G4S) | GGGGS |
| 79 | Peptide linker (G4S)₂ | GGGGSGGGGS |
| 80 | Peptide linker (SG4)₂ | SGGGGSGGGG |
| 81 | Peptide linker G4(SG4)₂ | GGGGSGGGGSGGGG |
| 82 | Peptide linker | GSPGSSSSGS |
| 83 | Peptide linker (G4S)₃ | GGGGSGGGGSGGGGS |
| 84 | Peptide linker (G4S)₄ | GGGGSGGGGSGGGGSGGGGS |
| 85 | Peptide linker | GSGSGSGS |
| 86 | Peptide linker | GSGSGNGS |
| 87 | Peptide linker | GGSGSGSG |
| 88 | Peptide linker | GGSGSG |
| 89 | Peptide linker | GGSG |
| 90 | Peptide linker | GGSGNGSG |
| 91 | Peptide linker | GGNGSGSG |
| 92 | Peptide linker | GGNGSG |
| 93 | cynomolgus Ox40 ECD | aa 29-214 |
| 94 | murine OX40 ECD | aa 10-211 |
| 95 | Nucleotide sequence | see Table 2 |
| | Fc hole chain | |
| 96 | Nucleotide sequence | see Table 2 |
| | human OX40 antigen Fc | |
| | knob chain | |
| 97 | Nucleotide sequence | see Table 2 |
| | cynomolgus OX40 antigen | |
| | Fc knob chain | |
| 98 | Nucleotide sequence murine | see Table 2 |
| | OX40 antigen Fc knob | |
| | chain | |
| 99 | Fc hole chain | see Table 2 |
| 100 | human OX40 antigen Fc | see Table 2 |
| | knob chain | |
| 101 | cynomolgus OX40 antigen | see Table 2 |
| | Fc knob chain | |
| 102 | murine OX40 antigen Fc | see Table 2 |
| | knob chain | |
| 103 | nucleotide sequence of | see Table 3 |
| | library DP88-4 | |
| 104 | nucleotide sequence of | see Table 4 |
| | Fab light chain Vk1_5 | |
| 105 | Fab light chain Vk1_5 | see Table 4 |
| 106 | nucleotide sequence of | see Table 4 |
| | Fab heavy chain VH1_69 | |
| 107 | Fab heavy chain VH1_69 | see Table 4 |
| 108 | LMB3 | see Table 5 |
| 109 | Vk1_5_L3r_S | see Table 5 |
| 110 | Vk1_5_L3r_SY | see Table 5 |
| 111 | Vk1_5_L3r_SPY | see Table 5 |
| 112 | RJH31 | see Table 5 |
| 113 | RJH32 | see Table 5 |
| 114 | DP88-v4-4 | see Table 5 |
| 115 | DP88-v4-6 | see Table 5 |
| 116 | DP88-v4-8 | see Table 5 |
| 117 | fdseqlong | see Table 5 |
| 118 | (Vk3_20/VH3_23) template | see Table 6 |
| 119 | nucleotide sequence of | see Table 7 |
| | Fab light chain Vk3_20 | |
| 120 | Fab light chain Vk3_20 | see Table 7 |
| 121 | nucleotide sequence of | see Table 7 |
| | Fab heavy chain VH3_23 | |
| 122 | Fab heavy chain VH3_23 | see Table 7 |
| | (DP47) | |
| 123 | MS64 | see Table 8 |
| 124 | DP47CDR3_ba (mod.) | see Table 8 |
| 125 | DP47-v4-4 | see Table 8 |
| 126 | DP47-v4-6 | see Table 8 |
| 127 | DP47-v4-8 | see Table 8 |
| 128 | fdseqlong | see Table 8 |
| 129 | V13_19/VH3_23 library | see Table 9 |
| | template | |
| 130 | nucleotide sequence of | see Table 10 |
| | Fab light chain V13_19 | |
| 131 | Fab light chain V13_19 | see Table 10 |
| 132 | LMB3 | see Table 11 |
| 133 | Vl_3_19_L3r_V | see Table 11 |
| 134 | Vl_3_19_L3r_HV | see Table 11 |
| 135 | Vl_3_19_L3r_HLV | see Table 11 |
| 136 | RJH80 | see Table 11 |
| 137 | Nucleotide sequence | see Table 12 |
| | OX40(8H9) VL | |
| 138 | Nucleotide sequence | see Table 12 |
| | OX40(8H9) VH | |
| 139 | Nucleotide sequence | see Table 12 |
| | OX40(49B4) VL | |
| 140 | Nucleotide sequence | see Table 12 |
| | OX40(49B4) VH | |
| 141 | Nucleotide sequence | see Table 12 |
| | OX40(1G4) VL | |
| 142 | Nucleotide sequence | see Table 12 |
| | OX40(1G4) VH | |
| 143 | Nucleotide sequence | see Table 12 |
| | OX40(20B7) VL | |
| 144 | Nucleotide sequence | see Table 12 |
| | OX40(20B7) VH | |
| 145 | Nucleotide sequence | see Table 12 |
| | OX40(CLC-563) VL | |
| 146 | Nucleotide sequence | see Table 12 |
| | OX40(CLC-563) VH | |
| 147 | Nucleotide sequence | see Table 12 |
| | OX40(CLC-564) VL | |
| 148 | Nucleotide sequence | see Table 12 |
| | OX40(CLC-564) VH | |
| 149 | Nucleotide sequence | see Table 12 |
| | OX40(17A9) VL | |
| 150 | Nucleotide sequence | see Table 12 |
| | OX40(17A9) VH | |
| 151 | 8H9 P329GLALA IgG1 | nucleotide sequence, see Table 13 |
| | (light chain) | |
| 152 | 8H9 P329GLALA IgG1 | nucleotide sequence, see Table 13 |
| | (heavy chain) | |
| 153 | 8H9 P329GLALA IgG1 | see Table 13 |
| | (light chain) | |
| 154 | 8H9 P329GLALA IgG1 | see Table 13 |
| | (heavy chain) | |
| 155 | 49B4 P329GLALA IgG1 | nucleotide sequence, see Table 13 |
| | (light chain) | |
| 156 | 49B4 P329GLALA IgG1 | nucleotide sequence, see Table 13 |
| | (heavy chain) | |
| 157 | 49B4 P329GLALA IgG1 | see Table 13 |
| | (light chain) | |
| 158 | 49B4 P329GLALA IgG1 | see Table 13 |
| | (heavy chain) | |
| 159 | 1G4 P329GLALA IgG1 | nucleotide sequence, see Table 13 |
| | (light chain) | |
| 160 | 1G4 P329GLALA IgG1 | nucleotide sequence, see Table 13 |
| | (heavy chain) | |
| 161 | 1G4 P329GLALA IgG1 | see Table 13 |
| | (light chain) | |
| 162 | 1G4 P329GLALA IgG1 | see Table 13 |
| | (heavy chain) | |
| 163 | 20B7 P329GLALA IgG1 | nucleotide sequence, see Table 13 |
| | (light chain) | |
| 164 | 20B7 P329GLALA IgG1 | nucleotide sequence, see Table 13 |
| | (heavy chain) | |
| 165 | 20B7 P329GLALA IgG1 | see Table 13 |
| | (light chain) | |
| 166 | 20B7 P329GLALA IgG1 | see Table 13 |
| | (heavy chain) | |
| 167 | CLC-563 P329GLALA | nucleotide sequence, see Table 13 |
| | IgG1 | |
| | (light chain) | |
| 168 | CLC-563 P329GLALA | nucleotide sequence, see Table 13 |
| | IgG1 | |
| | (heavy chain) | |
| 169 | CLC-563 P329GLALA | see Table 13 |
| | IgG1 | |
| | (light chain) | |
| 170 | CLC-563 P329GLALA | see Table 13 |
| | IgG1 | |
| | (heavy chain) | |
| 171 | CLC-564 P329GLALA | nucleotide sequence, see Table 13 |
| | IgG1 | |
| | (light chain) | |
| 172 | CLC-564 P329GLALA | nucleotide sequence, see Table 13 |
| | IgG1 | |
| | (heavy chain) | |
| 173 | CLC-564 P329GLALA | see Table 13 |
| | IgG1 | |
| | (light chain) | |
| 174 | CLC-564 P329GLALA | see Table 13 |
| | IgG1 | |
| | (heavy chain) | |
| 175 | 17A9 P329GLALA IgG1 | nucleotide sequence, see Table 13 |
| | (light chain) | |
| 176 | 17A9 P329GLALA IgG1 | nucleotide sequence, see Table 13 |
| | (heavy chain) | |
| 177 | 17A9 P329GLALA IgG1 | see Table 13 |
| | (light chain) | |
| 178 | 17A9 P329GLALA IgG1 | see Table 13 |
| | (heavy chain) | |
| 179 | human OX40 His | see Table 15 |
| 180 | murine OX40 His | see Table 15 |
| 181 | Nucleotide sequence | see Table 21 |
| | dimeric human OX40 | |
| | antigen Fc | |
| 182 | dimeric human OX40 | see Table 21 |
| | antigen Fc | |
| 183 | (8H9) VHCH1-Heavy | nucleotide sequence, see Table 25 |
| | chain-(28H1) VHCL | |
| 184 | VLCH1-Light chain 2 | nucleotide sequence, see Table 25 |
| | (28H1) | |
| 185 | (8H9) VHCH1-Heavy | see Table 25 |
| | chain-(28H1) VHCL | |
| 186 | VLCH1-Light chain 2 | see Table 25 |
| | (28H1) | |
| 187 | (49B4) VHCH1-Heavy | nucleotide sequence, see Table 25 |
| | chain-(28H1) VHCL | |
| 188 | (49B4) VHCH1-Heavy | see Table 25 |
| | chain-(28H1) VHCL | |
| 189 | (1G4) VHCH1-Heavy | nucleotide sequence, see Table 25 |
| | chain-(28H1) VHCL | |
| 190 | (1G4) VHCH1-Heavy | see Table 25 |
| | chain-(28H1) VHCL | |
| 191 | (20B7) VHCH1-Heavy | nucleotide sequence, see Table 25 |
| | chain-(28H1) VHCL | |
| 192 | (20B7) VHCH1-Heavy | see Table 25 |
| | chain-(28H1) VHCL | |
| 193 | (CLC-563) VHCH1-Heavy | nucleotide sequence, see Table 25 |
| | chain-(28H1) VHCL | |
| 194 | (CLC-563) VHCH1-Heavy | see Table 25 |
| | chain-(28H1) VHCL | |
| 195 | (CLC-564) VHCH1-Heavy | nucleotide sequence, see Table 25 |
| | chain-(28H1) VHCL | |
| 196 | (CLC-564) VHCH1-Heavy | see Table 25 |
| | chain-(28H1) VHCL | |
| 197 | (28H1) VHCL-heavy chain | nucleotide sequence, see Table 27 |
| | hole | |
| 198 | (28H1) VLCH1-light chain 2 | see Table 27 |
| 199 | (8H9) VHCH1-heavy chain | nucleotide sequence, see Table 27 |
| | knob | |
| 200 | (8H9) VHCH1-heavy chain | see Table 27 |
| | knob | |
| 201 | (49B4) VHCH1-heavy | nucleotide sequence, see Table 27 |
| | chain knob | |
| 202 | (49B4) VHCH1-heavy | see Table 27 |
| | chain knob | |
| 203 | (1G4) VHCH1-heavy chain | nucleotide sequence, see Table 27 |
| | knob | |
| 204 | (1G4) VHCH1-heavy chain | see Table 27 |
| | knob | |
| 205 | (20B7) VHCH1-heavy | nucleotide sequence, see Table 27 |
| | chain knob | |
| 206 | (20B7) VHCH1-heavy | see Table 27 |
| | chain knob | |
| 207 | (CLC-563) VHCH1-heavy | nucleotide sequence, see Table 27 |
| | chain knob | |
| 208 | (CLC-563) VHCH1-heavy | see Table 27 |
| | chain knob | |
| 209 | (CLC-564) VHCH1-heavy | nucleotide sequence, see Table 27 |
| | chain knob | |
| 210 | (CLC-564) VHCH1-heavy | see Table 27 |
| | chain knob | |
| 211 | HC 1 | see Table 29 |
| | (49B4) VHCH1_VHCH1 Fc | |
| | knob VH (4B9) (nucleotide | |
| | sequence) | |
| 212 | HC 2 | see Table 29 |
| | (49B4) VHCH1_VHCH1 Fc | |
| | hole VL (4B9) (nucleotide | |
| | sequence) | |
| 213 | HC 1 | see Table 29 |
| | (49B4) VHCH1_VHCH1 Fc | |
| | knob VH (4B9) | |
| 214 | HC 2 | see Table 29 |
| | (49B4) VHCH1_VHCH1 Fc | |
| | hole VL (4B9) | |
| 215 | HC 1 | see Table 29 |
| | (49B4) VHCH1_VHCH1 Fc | |
| | knob VH (28H1) | |
| | (nucleotide sequence) | |
| 216 | HC 2 | see Table 29 |
| | (49B4) VHCH1_VHCH1 Fc | |
| | hole VL (28H1) (nucleotide | |
| | sequence) | |
| 217 | HC 1 | see Table 29 |
| | (49B4) VHCH1_VHCH1 Fc | |
| | knob VH (28H1) | |
| 218 | HC 2 | see Table 29 |
| | (49B4) VHCH1_VHCH1 Fc | |
| | hole VL (28H1) | |
| 219 | HC 1 | see Table 29 |
| | (49B4) VHCH1_VHCH1 Fc | |
| | knob VH (DP47) | |
| | (nucleotide sequence) | |
| 220 | HC 2 | see Table 29 |
| | (49B4) VHCH1_VHCH1 Fc | |
| | hole VL (DP47) (nucleotide | |
| | sequence) | |
| 221 | HC 1 | see Table 29 |
| | (49B4) VHCH1_VHCH1 Fc | |
| | knob VH (DP47) | |
| 222 | HC 2 | see Table 29 |
| | (49B4) VHCH1_VHCH1 Fc | |
| | hole VL (DP47) | |
| 223 | (49B4) VLCL*-light chain 1 | see Table 34 |
| | *E123R/Q124K | |
| | (nucleotide sequence) | |
| 224 | heavy chain | see Table 34 |
| | (49B4) VHCH1*_VHCH1* | |
| | Fc knob VLCH1 (28H1) | |
| | *K147E/K213E | |
| | (nucleotide sequence) | |
| 225 | (28H1) VHCL-light chain 2 | see Table 34 |
| | (nucleotide sequence) | |
| 226 | (49B4) VLCL*-light chain 1 | see Table 34 |
| | *E123R/Q124K | |
| 227 | heavy chain | see Table 34 |
| | (49B4) VHCH1*_VHCH1* | |
| | Fc knob VLCH1 (28H1) | |
| | *K147E/K213E | |
| 228 | (28H1) VHCL-light chain 2 | see Table 34 |
| 229 | heavy chain | see Table 34 |
| | (49B4) VHCH1*_VHCH1* | |
| | Fc knob VLCH1 (DP47) | |
| | *K147E/K213E | |
| | (nucleotide sequence) | |
| 230 | (DP47) VHCL-light chain 2 | see Table 34 |
| | (nucleotide sequence) | |
| 231 | heavy chain | see Table 34 |
| | (49B4) VHCH1*_VHCH1* | |
| | Fc knob VLCH1 (DP47) | |
| | *K147E/K213E | |
| 232 | (DP47) VHCL-light chain 2 | see Table 34 |
| 233 | HC 1 | see Table 31 |
| | (49B4) VHCH1_VHCH1 Fc | |
| | knob VL (4B9) | |
| 234 | HC 2 | see Table 31 |
| | (49B4) VHCH1_VHCH1 Fc | |
| | hole VH (4B9) | |
| 235 | HC 1 | see Table 32 |
| | (49B4) VHCH1_VHCH1 Fc | |
| | wt knob VH (4B9) | |
| | (nucleotide sequence) | |
| 236 | HC 2 | see Table 32 |
| | (49B4) VHCH1_VHCH1 Fc | |
| | wt hole VL (4B9) | |
| | (nucleotide sequence) | |
| 237 | HC 1 | see Table 32 |
| | (49B4) VHCH1_VHCH1 Fc | |
| | wt knob VH (4B9) | |
| 238 | HC 2 | see Table 32 |
| | (49B4) VHCH1_VHCH1 Fc | |
| | wt hole VL (4B9) | |
| 239 | human 4-1BB ECD | Uniprot Q07011, aa 24-186, Table 39 |
| 240 | cynomolgus 4-1BB ECD | aa 24-186, Table 39 |
| 241 | murine 4-1BB ECD | Uniprot P20334, aa 24-187, Table 39 |
| 242 | Nucleotide sequence of | see Table 40 |
| | human 4-1BB antigen Fc | |
| | knob chain | |
| 243 | Nucleotide sequence of | see Table 40 |
| | cynomolgus 4-1BB antigen | |
| | Fc knob chain | |
| 244 | Nucleotide sequence of | see Table 40 |
| | murine 4-1BB antigen Fc | |
| | knob chain | |
| 245 | human 4-1BB antigen Fc | see Table 40 |
| | knob chain | |
| 246 | cynomolgus 4-1BB antigen | see Table 40 |
| | Fc knob chain | |
| 247 | murine 4-1BB antigen Fc | see Table 40 |
| | knob chain | |
| 248 | MS63 Primer | see Table 46, |
| | | TTTCGCACAGTAATATACGGCCGTGTCC |
| 249 | 4-1BB(12B3, 11D5, 9B11, | SYAIS |
| | 20G2) CDR-H1 | |
| 250 | 4-1BB(25G7) CDR-H1 | SYAMS |
| 251 | 4-1BB(12B3, 11D5, 9B11, | GIIPIFGTANYAQKFQG |
| | 20G2) CDR-H2 | |
| 252 | 4-1BB(25G7) CDR-H2 | AISGSGGSTYYADSVKG |
| 253 | 4-1BB(12B3) CDR-H3 | SEFRFYADFDY |
| 254 | 4-1BB(25G7) CDR-H3 | DDPWPPFDY |
| 255 | 4-1BB(11D5) CDR-H3 | STLIYGYFDY |
| 256 | 4-1BB(9B11) CDR-H3 | SSGAYPGYFDY |
| 257 | 4-1BB(20G2) CDR-H3 | SYYWESYPFDY |
| 258 | 4-1BB(12B3, 11D5, 9B11, | RASQSISSWLA |
| | 20G2) CDR-L1 | |
| 259 | 4-1BB(25G7) CDR-L1 | QGDSLRSYYAS |
| 260 | 4-1BB(12B3, 11D5, 9B11, | DASSLES |
| | 20G2) CDR-L2 | |
| 261 | 4-1BB(25G7) CDR-L2 | GKNNRPS |
| 262 | 4-1BB(12B3) CDR-L3 | QQYHSYPQT |
| 263 | 4-1BB(25G7) CDR-L3 | NSLDRRGMWV |
| 264 | 4-1BB(11D5) CDR-L3 | QQLNSYPQT |
| 265 | 4-1BB(9B11) CDR-L3 | QQVNSYPQT |
| 266 | 4-1BB(20G2) CDR-L3 | QQQHSYYT |
| 267 | 4-1BB(12B3) VH | QVQLVQSGAEVKKPGSSVKVSCKASGGTFSSYAIS |
| | | WVRQAPGQGLEWMGGIIPIFGTANYAQKFQGRVT |
| | | ITADKSTSTAYMELSSLRSEDTAVYYCARSEFRFY |
| | | ADFDYWGQGTTVTVSS |
| 268 | 4-1BB(12B3) VL | DIQMTQSPSTLSASVGDRVTITCRASQSISSWLAW |
| | | YQQKPGKAPKLLIYDASSLESGVPSRFSGSGSGTEF |
| | | TLTISSLQPDDFATYYCQQYHSYPQTFGQGTKVEIK |
| 269 | 4-1BB(25G7) VH | EVQLLESGGGLVQPGGSLRLSCAASGFTFSSYAMS |
| | | WVRQAPGKGLEWVSAISGSGGSTYYADSVKGRFT |
| | | ISRDNSKNTLYLQMNSLRAEDTAVYYCARDDPWP |
| | | PFDYWGQGTLVTVSS |
| 270 | 4-1BB(25G7) VL | SSELTQDPAVSVALGQTVRITCQGDSLRSYYASWY |
| | | QQKPGQAPVLVIYGKNNRPSGIPDRFSGSSSGNTAS |
| | | LTITGAQAEDEADYYCNSLDRRGMWVFGGGTKLTV |
| 271 | 4-1BB(11D5) VH | QVQLVQSGAEVKKPGSSVKVSCKASGGTFSSYAIS |
| | | WVRQAPGQGLEWMGGIIPIFGTANYAQKFQGRVT |
| | | ITADKSTSTAYMELSSLRSEDTAVYYCARSTLIYG |
| | | YFDYWGQGTTVTVSS |
| 272 | 4-1BB(11D5) VL | DIQMTQSPSTLSASVGDRVTITCRASQSISSWLAW |
| | | YQQKPGKAPKLLIYDASSLESGVPSRFSGSGSGTEF |
| | | TLTISSLQPDDFATYYCQQLNSYPQTFGQGTKVEIK |
| 273 | 4-1BB(9B11) VH | QVQLVQSGAEVKKPGSSVKVSCKASGGTFSSYAIS |
| | | WVRQAPGQGLEWMGGIIPIFGTANYAQKFQGRVT |
| | | ITADKSTSTAYMELSSLRSEDTAVYYCARSSGAYP |
| | | GYFDYWGQGTTVTVSS |
| 274 | 4-1BB(9B11) VL | DIQMTQSPSTLSASVGDRVTITCRASQSISSWLAW |
| | | YQQKPGKAPKLLIYDASSLESGVPSRFSGSGSGTEF |
| | | TLTISSLQPDDFATYYCQQVNSYPQTFGQGTKVEIK |
| 275 | 4-1BB(20G2) VH | QVQLVQSGAEVKKPGSSVKVSCKASGGTFSSYAIS |
| | | WVRQAPGQGLEWMGGIIPIFGTANYAQKFQGRVT |
| | | ITADKSTSTAYMELSSLRSEDTAVYYCARSYYWES |
| | | YPFDYWGQGTTVTVSS |
| 276 | 4-1BB(20G2) VL | DIQMTQSPSTLSASVGDRVTITCRASQSISSWLAW |
| | | YQQKPGKAPKLLIYDASSLESGVPSRFSGSGSGTEF |
| | | TLTISSLQPDDFATYYCQQQHSYYTFGQGTKVEIK |
| 277 | Nucleotide sequence of 4- | see Table 47 |
| | 1BB(12B3) VH | |
| 278 | Nucleotide sequence of 4- | see Table 47 |
| | 1BB(12B3) VL | |
| 279 | Nucleotide sequence of 4- | see Table 47 |
| | 1BB(25G7) VH | |
| 280 | Nucleotide sequence of 4- | see Table 47 |
| | 1BB(25G7) VL | |
| 281 | Nucleotide sequence of 4- | see Table 47 |
| | 1BB(11D5) VH | |
| 282 | Nucleotide sequence of 4- | see Table 47 |
| | 1BB(11D5) VL | |
| 283 | Nucleotide sequence of 4- | see Table 47 |
| | 1BB(9B11) VH | |
| 284 | Nucleotide sequence of 4- | see Table 47 |
| | 1BB(9B11) VL | |
| 285 | Nucleotide sequence of 4- | see Table 47 |
| | 1BB(20G2) VH | |
| 286 | Nucleotide sequence of 4- | see Table 47 |
| | 1BB(20G2) VL | |
| 287 | nucleotide sequence of | see Table 48 |
| | 12B3 P329GLALA IgG1 | |
| | (light chain) | |
| 288 | nucleotide sequence of | see Table 48 |
| | 12B3 P329GLALA IgG1 | |
| | (heavy chain) | |
| 289 | 12B3 P329GLALA IgG1 | see Table 48 |
| | (light chain) | |
| 290 | 12B3 P329GLALA IgG1 | see Table 48 |
| | (heavy chain) | |
| 291 | nucleotide sequence of | see Table 48 |
| | 25G7 P329GLALA IgG1 | |
| | (light chain) | |
| 292 | nucleotide sequence of | see Table 48 |
| | 25G7 P329GLALA IgG1 | |
| | (heavy chain) | |
| 293 | 25G7 P329GLALA IgG1 | see Table 48 |
| | (light chain) | |
| 294 | 25G7 P329GLALA IgG1 | see Table 48 |
| | (heavy chain) | |
| 295 | nucleotide sequence of | see Table 48 |
| | 11D5 P329GLALA IgG1 | |
| | (light chain) | |
| 296 | nucleotide sequence of | see Table 48 |
| | 11D5 P329GLALA IgG1 | |
| | (heavy chain) | |
| 297 | 11D5 P329GLALA IgG1 | see Table 48 |
| | (light chain) | |
| 298 | 11D5 P329GLALA IgG1 | see Table 48 |
| | (heavy chain) | |
| 299 | nucleotide sequence of | see Table 48 |
| | 9B11 P329GLALA IgG1 | |
| | (light chain) | |
| 300 | nucleotide sequence of | see Table 48 |
| | 9B11 P329GLALA IgG1 | |
| | (heavy chain) | |
| 301 | 9B11 P329GLALA IgG1 | see Table 48 |
| | (light chain) | |
| 302 | 9B11 P329GLALA IgG1 | see Table 48 |
| | (heavy chain) | |
| 303 | nucleotide sequence of | see Table 48 |
| | 20G2 P329GLALA IgG1 | |
| | (light chain) | |
| 304 | nucleotide sequence of | see Table 48 |
| | 20G2 P329GLALA IgG1 | |
| | (heavy chain) | |
| 305 | 20G2 P329GLALA IgG1 | see Table 48 |
| | (light chain) | |
| 306 | 20G2 P329GLALA IgG1 | see Table 48 |
| | (heavy chain) | |
| 307 | (12B3) VHCH1-Heavy | see Table 59 |
| | chain-(28H1) VHCL | |
| | (nucleotide sequence) | |
| 308 | (12B3) VHCH1-Heavy | see Table 59 |
| | chain-(28H1) VHCL | |
| 309 | (25G7) VHCH1-Heavy | see Table 59 |
| | chain-(28H1) VHCL | |
| | (nucleotide sequence) | |
| 310 | (25G7) VHCH1-Heavy | see Table 59 |
| | chain-(28H1) VHCL | |
| 311 | (11D5) VHCH1-Heavy | see Table 59 |
| | chain-(28H1) VHCL | |
| | (nucleotide sequence) | |
| 312 | (11D5) VHCH1-Heavy | see Table 59 |
| | chain-(28H1) VHCL | |
| 313 | (12B3) VHCH1-heavy | see Table 61 |
| | chain knob | |
| | (nucleotide sequence) | |
| 314 | (12B3) VHCH1-heavy | see Table 61 |
| | chain knob | |
| 315 | (25G7) VHCH1-heavy | see Table 61 |
| | chain knob | |
| | (nucleotide sequence) | |
| 316 | (25G7) VHCH1-heavy | see Table 61 |
| | chain knob | |
| 317 | (25G7) VHCH1 Fc knob | see Table 63 |
| | VH (4B9) (nucleotide | |
| | sequence, heavy chain 1) | |
| 318 | (25G7) VHCH1 Fc hole VL | see Table 63 |
| | (4B9) (nucleotide sequence, | |
| | heavy chain 2) | |
| 319 | (25G7) VHCH1 Fc knob | see Table 63 |
| | VH (4B9) (heavy chain 1) | |
| 320 | (25G7) VHCH1 Fc hole VL | see Table 63 |
| | (4B9) (heavy chain 2) | |
| 321 | (11D5) VHCH1 Fc knob | see Table 63 |
| | VH (4B9) (nucleotide | |
| | sequence, heavy chain 1) | |
| 322 | (11D5) VHCH1 Fc hole VL | see Table 63 |
| | (4B9) | |
| | (nucleotide sequence, heavy | |
| | chain 2) | |
| 323 | (11D5) VHCH1 Fc knob | see Table 63 |
| | VH (4B9) (heavy chain 1) | |
| 324 | (11D5) VHCH1 Fc hole VL | see Table 63 |
| | (4B9) | |
| | (heavy chain 2) | |
| 325 | (12B3) VHCH1_VHCH1 Fc | see Table 65 |
| | knob VH (4B9) (nucleotide | |
| | sequence) | |
| 326 | (12B3) VHCH1_VHCH1 Fc | see Table 65 |
| | hole VL (4B9) (nucleotide | |
| | sequence) | |
| 327 | (12B3) VHCH1_VHCH1 Fc | see Table 65 |
| | knob VH (4B9) | |
| 328 | (12B3) VHCH1_VHCH1 Fc | see Table 65 |
| | hole VL (4B9) | |
| 329 | (25G7) VHCH1_VHCH1 | see Table 65 |
| | Fc knob VH (4B9) | |
| | (nucleotide sequence) | |
| 330 | (25G7) VHCH1_VHCH1 | see Table 65 |
| | Fc hole VL (4B9) | |
| | (nucleotide sequence) | |
| 331 | (25G7) VHCH1_VHCH1 | see Table 65 |
| | Fc knob VH (4B9) | |
| 332 | (25G7) VHCH1_VHCH1 | see Table 65 |
| | Fc hole VL (4B9) | |
| 333 | (11D5) VHCH1_VHCH1 | see Table 65 |
| | Fc knob VH (4B9) | |
| | (nucleotide sequence) | |
| 334 | (11D5) VHCH1_VHCH1 | see Table 65 |
| | Fc hole VL (4B9) | |
| | (nucleotide sequence) | |
| 335 | (11D5) VHCH1_VHCH1 | see Table 65 |
| | Fc knob VH (4B9) | |
| 336 | (11D5) VHCH1_VHCH1 | see Table 65 |
| | Fc hole VL (4B9) | |
| 337 | (9B11) VHCH1_VHCH1 Fc | see Table 65 |
| | knob VH (4B9) (nucleotide | |
| | sequence) | |
| 338 | (9B11) VHCH1_VHCH1 Fc | see Table 65 |
| | hole VL (4B9) (nucleotide | |
| | sequence) | |
| 339 | (9B11) VHCH1_VHCH1 Fc | see Table 65 |
| | knob VH (4B9) | |
| 340 | (9B11) VHCH1_VHCH1 Fc | see Table 65 |
| | hole VL (4B9) | |
| 341 | (12B3) VHCH1_VHCH1 Fc | see Table 66 |
| | knob VL (4B9) (nucleotide | |
| | sequence) | |
| 342 | (12B3) VHCH1_VHCH1 Fc | see Table 66 |
| | hole VH (4B9) (nucleotide | |
| | sequence) | |
| 343 | (12B3) VHCH1_VHCH1 Fc | see Table 66 |
| | knob VL (4B9) | |
| 344 | (12B3) VHCH1_VHCH1 Fc | see Table 66 |
| | hole VH (4B9) | |
| 345 | (25G7) VHCH1_VHCH1 | see Table 66 |
| | Fc knob VL (4B9) | |
| | (nucleotide sequence) | |
| 346 | (25G7) VHCH1_VHCH1 | see Table 66 |
| | Fc hole VH (4B9) | |
| | (nucleotide sequence) | |
| 347 | (25G7) VHCH1_VHCH1 | see Table 66 |
| | Fc knob VL (4B9) | |
| 348 | (25G7) VHCH1_VHCH1 | see Table 66 |
| | Fc hole VH (4B9) | |
| 349 | (11D5) VHCH1_VHCH1 | see Table 66 |
| | Fc knob VL (4B9) | |
| | (nucleotide sequence) | |
| 350 | (11D5) VHCH1_VHCH1 | see Table 66 |
| | Fc hole VH (4B9) | |
| | (nucleotide sequence) | |
| 351 | (11D5) VHCH1_VHCH1 | see Table 66 |
| | Fc knob VL (4B9) | |
| 352 | (11D5) VHCH1_VHCH1 | see Table 66 |
| | Fc hole VH (4B9) | |
| 353 | (9B11) VHCH1_VHCH1 Fc | see Table 66 |
| | knob VL (4B9) (nucleotide | |
| | sequence) | |
| 354 | (9B11) VHCH1_VHCH1 Fc | see Table 66 |
| | hole VH (4B9) (nucleotide | |
| | sequence) | |
| 355 | (9B11) VHCH1_VHCH1 Fc | see Table 66 |
| | knob VL (4B9) | |
| 356 | (9B11) VHCH1_VHCH1 Fc | see Table 66 |
| | hole VH (4B9) | |
| 357 | human GITR ECD | Q9Y5U5, aa 26-162, see Table 72 |
| 358 | cynomolgus GITR ECD | aa 20-156, see Table 72 |
| 359 | murine GITR ECD | O35714, aa 20-153, see Table 72 |
| 360 | Nucleotide sequence | see Table 73 |
| | human GITR antigen Fc | |
| | knob chain | |
| 361 | Nucleotide sequence | see Table 73 |
| | cynomolgus GITR antigen | |
| | Fc knob chain | |
| 362 | Nucleotide sequence | see Table 73 |
| | murine GITR antigen Fc | |
| | knob chain | |
| 363 | human GITR antigen Fc | see Table 73 |
| | knob chain | |
| 364 | cynomolgus GITR antigen | see Table 73 |
| | Fc knob chain | |
| 365 | murine GITR antigen Fc | see Table 73 |
| | knob chain | |
| 366 | Fab light chain V13_19 | see Table 75 |
| | template | |
| 367 | Fab heavy chain VH1_69 | see Table 75 |
| | template | |
| 368 | nucleotide sequence of Fab | see Table 75 |
| | light chain V13_19 template | |
| 369 | nucleotide sequence of Fab | see Table 75 |
| | heavy chain VH1_69 | |
| | template | |
| 370 | Complete pRJH52 Fab | see Table 75 |
| | sequence | |
| 371 | GITR(8A06) CDR-H1 | SYAIS |
| 372 | GITR(8A06) CDR-H2 | GIIPIFGTANYAQKFQG |
| 373 | GITR(8A06) CDR-H3 | GYYAIDY |
| 374 | GITR(8A06) CDR-L1 | QGDSLRSYYAS |
| 375 | GITR(8A06) CDR-L2 | GKNNRPS |
| 376 | GITR(8A06) CDR-L3 | NSPQTSGSAV |
| 377 | GITR(6C8) CDR-H1 | TSGMGVG |
| 378 | GITR(6C8) CDR-H2 | HIWWDDDKYYQPSLKS |
| 379 | GITR(6C8) CDR-H3 | TRRYFPFAY |
| 380 | GITR(6C8) CDR-L1 | KASQNVGTNVA |
| 381 | GITR(6C8) CDR-L2 | SASYRYS |
| 382 | GITR(6C8) CDR-L3 | QQYNTDPLT |
| 383 | GITR(8A06) VH | QVQLVQSGAEVKKPGSSVKVSCKASGGTFSSYAIS |
| | | WVRQAPGQGLEWMGGIIPIFGTANYAQKFQGRVT |
| | | ITADKSTSTAYMELSSLRSEDTAVYYCARGYYAID |
| | | YWGQGTTVTVSS |
| 384 | GITR(8A06) VL | SSELTQDPAVSVALGQTVRITCQGDSLRSYYASWY |
| | | QQKPGQAPVLVIYGKNNRPSGIPDRFSGSSSGNTAS |
| | | LTITGAQAEDEADYYCNSPQTSGSAVFGGGTKLTVL |
| 385 | GITR(6C8) VH | QVTLRESGPALVKPTQTLTLTCTFSGFSLSTSGMG |
| | | VGWIRQPPGKALEWLAHIWWDDDKYYQPSLKSR |
| | | LTISKDTSKNQVVLTMTNMDPVDTATYYCARTRR |
| | | YFPFAYWGQGTLVTVSS |
| 386 | GITR(6C8) VL | EIVMTQSPATLSVSPGERATLSCKASQNVGTNVA |
| | | WYQQKPGQAPRLLIYSASYRYSGIPARFSGSGSGT |
| | | EFTLTISSLQSEDFAVYYCQQYNTDPLTFGGGTKV |
| | | EIK |
| 387 | nucleotide sequence of | see Table 77 |
| | GITR(8A06) VL | |
| 388 | nucleotide sequence of | see Table 77 |
| | GITR(8A06) VH | |
| 389 | nucleotide sequence of | see Table 77 |
| | GITR(6C8) VL | |
| 390 | nucleotide sequence of | see Table 77 |
| | GITR(6C8) VH | |
| 391 | nucleotide sequence of | see Table 78 |
| | 8A06 P329GLALA IgG1 | |
| | (light chain) | |
| 392 | nucleotide sequence of | see Table 78 |
| | 8A06 P329GLALA IgG1 | |
| | (heavy chain) | |
| 393 | 8A06 P329GLALA IgG1 | see Table 78 |
| | (light chain) | |
| 394 | 8A06 P329GLALA IgG1 | see Table 78 |
| | (heavy chain) | |
| 395 | nucleotide sequence of 6C8 | see Table 78 |
| | P329GLALA IgG1 | |
| | (light chain) | |
| 396 | nucleotide sequence of 6C8 | see Table 78 |
| | P329GLALA IgG1 | |
| | (heavy chain) | |
| 397 | 6C8 P329GLALA IgG1 | see Table 78 |
| | (light chain) | |
| 398 | 6C8 P329GLALA IgG1 | see Table 78 |
| | (heavy chain) | |
| 399 | HC 1 | see Table 83 |
| | (8A06) VHCH1_VHCH1 | |
| | Fc knob VH (28H1) | |
| | (nucleotide sequence) | |
| 400 | HC 2 | see Table 83 |
| | (8A06) VHCH1_VHCH1 | |
| | Fc hole VL (28H1) | |
| | (nucleotide sequence) | |
| 401 | HC 1 | see Table 83 |
| | (8A06) VHCH1_VHCH1 | |
| | Fc knob VH (28H1) | |
| 402 | HC 2 | see Table 83 |
| | (8A06) VHCH1_VHCH1 | |
| | Fc hole VL (28H1) | |
| 403 | HC 1 | see Table 83 |
| | (6C8) VHCH1_VHCH1 Fc | |
| | knob VH (28H1) | |
| | (nucleotide sequence) | |
| 404 | HC 2 | see Table 83 |
| | (6C8) VHCH1_VHCH1 Fc | |
| | hole VL (28H1) (nucleotide | |
| | sequence) | |
| 405 | HC 1 | see Table 83 |
| | (6C8) VHCH1_VHCH1 Fc | |
| | knob VH (28H1) | |
| 406 | HC 2 | see Table 83 |
| | (6C8) VHCH1_VHCH1 Fc | |
| | hole VL (28H1) | |
| 407 | heavy chain | see Table 84 |
| | (8A06) VHCH1_VHCH1Fc | |
| | VHCL (28H1) (nucleotide | |
| | sequence) | |
| 408 | (28H1) VLCH1-light chain | see Table 84 |
| | 2 (nucleotide sequence) | |
| 409 | heavy chain | see Table 84 |
| | (8A06) VHCH1_VHCH1Fc | |
| | VHCL (28H1) | |
| 410 | (28H1) VLCH1-light chain 2 | see Table 84 |
| 411 | heavy chain | see Table 84 |
| | (6C8) VHCH1_VHCH1Fc | |
| | VHCL (28H1) (nucleotide | |
| | sequence) | |
| 412 | heavy chain | see Table 84 |
| | (6C8) VHCH1_VHCH1Fc | |
| | VHCL (28H1) | |

All nucleotide sequences are presented without the respective stop codon sequences.

[0569] In the following specific embodiments of the invention are listed:

[0570] 1. A bispecific antigen binding molecule, comprising
[0571] (a) four moieties capable of specific binding to a costimulatory TNF receptor family member,
[0572] (b) at least one moiety capable of specific binding to a target cell antigen, and
[0573] (c) a Fc domain composed of a first and a second subunit capable of stable association.

[0574] 2. The bispecific antigen binding molecule of claim 1, wherein the costimulatory TNF receptor family member is selected from the group consisting of OX40 and 4-1BB.

[0575] 3. The bispecific antigen binding molecule of claim 1 or 2, wherein the costimulatory TNF receptor family member is OX40.

[0576] 4. The bispecific antigen binding molecule of any one of claims 1 to 3, wherein the moiety capable of specific binding to a costimulatory TNF receptor family member binds to a polypeptide comprising the amino acid sequence of SEQ ID NO:1.

[0577] 5. The bispecific antigen binding molecule of any one of claims 1 to 4, comprising four moieties capable of specific binding to OX40, wherein each of said moieties comprises a VH domain comprising
[0578] (i) a CDR-H1 comprising the amino acid sequence selected from the group consisting of SEQ ID NO:2 and SEQ ID NO:3,
[0579] (ii) a CDR-H2 comprising the amino acid sequence selected from the group consisting of SEQ ID NO:4 and SEQ ID NO:5, and
[0580] (iii) a CDR-H3 comprising the amino acid sequence selected from the group consisting of SEQ ID NO:6, SEQ ID NO:7, SEQ ID NO:8, SEQ ID NO: 9, SEQ ID NO:10, SEQ ID NO:11 and SEQ ID NO:12, and a VL domain comprising
[0581] (iv) a CDR-L1 comprising the amino acid sequence selected from the group consisting of SEQ ID NO:13, SEQ ID NO:14 and SEQ ID NO:15,
[0582] (v) a CDR-L2 comprising the amino acid sequence selected from the group consisting of SEQ ID NO:16, SEQ ID NO:17 and SEQ ID NO:18, and
[0583] (vi) a CDR-L3 comprising the amino acid sequence selected from the group consisting of SEQ ID NO:19, SEQ ID NO:20, SEQ ID NO:21, SEQ ID NO:22, SEQ ID NO:23 and SEQ ID NO:24.

[0584] 6. The bispecific antigen binding molecule of any one of claims 1 to 5, wherein each of the moieties capable of specific binding to OX40 comprises a heavy chain variable region VH comprising an amino acid sequence that is at least about 95%, 96%, 97%, 98%, 99% or 100% identical to an amino acid sequence selected from the group consisting of SEQ ID NO:25, SEQ ID NO: 27, SEQ ID NO:29, SEQ ID NO:31, SEQ ID NO:33, SEQ ID NO:35 and SEQ ID NO:37 and a light chain variable region VL comprising an amino acid sequence that is at least about 95%, 96%, 97%, 98%, 99% or 100% identical to an amino acid sequence of SEQ ID NO:26, SEQ ID NO: 28, SEQ ID NO:30, SEQ ID NO:30, SEQ ID NO:32, SEQ ID NO:34, SEQ ID NO:36 and SEQ ID NO:38.

[0585] 7. The bispecific antigen binding molecule of any one of claims 1 to 5, wherein each of the moieties capable of specific binding to OX40 comprises
[0586] (i) a heavy chain variable region VH comprising an amino acid sequence of SEQ ID NO:25 and a light chain variable region VL comprising an amino acid sequence of SEQ ID NO:26,
[0587] (ii) a heavy chain variable region VH comprising an amino acid sequence of SEQ ID NO:27 and a light chain variable region VL comprising an amino acid sequence of SEQ ID NO:28,
[0588] (iii) a heavy chain variable region VH comprising an amino acid sequence of SEQ ID NO:29 and a light chain variable region VL comprising an amino acid sequence of SEQ ID NO:30,
[0589] (iv) a heavy chain variable region VH comprising an amino acid sequence of SEQ ID NO:31 and a light chain variable region VL comprising an amino acid sequence of SEQ ID NO:32,
[0590] (v) a heavy chain variable region VH comprising an amino acid sequence of SEQ ID NO:33 and a light chain variable region VL comprising an amino acid sequence of SEQ ID NO:34,
[0591] (vi) a heavy chain variable region VH comprising an amino acid sequence of SEQ ID NO:35 and a light chain variable region VL comprising an amino acid sequence of SEQ ID NO:36, or
[0592] (vii) a heavy chain variable region VH comprising an amino acid sequence of SEQ ID NO:37 and a light chain variable region VL comprising an amino acid sequence of SEQ ID NO:38.

[0593] 8. The bispecific antigen binding molecule of any one of claims 1 to 7, wherein the target cell antigen is selected from the group consisting of Fibroblast Activation Protein (FAP), Melanoma-associated Chondroitin Sulfate Proteoglycan (MCSP), Epidermal Growth Factor Receptor (EGFR), Carcinoembryonic Antigen (CEA), CD19, CD20 and CD33.

[0594] 9. The bispecific antigen binding molecule of any one of claims 1 to 8, wherein the target cell antigen is Fibroblast Activation Protein (FAP).

[0595] 10. The bispecific antigen binding molecule of any one of claims 1 to 9, wherein the moiety capable of specific binding to FAP comprises a VH domain comprising
[0596] (i) a CDR-H1 comprising the amino acid sequence selected from the group consisting of SEQ ID NO:68 and SEQ ID NO:69,
[0597] (ii) a CDR-H2 comprising the amino acid sequence selected from the group consisting of SEQ ID NO:70 and SEQ ID NO:71, and
[0598] (iii) a CDR-H3 comprising the amino acid sequence selected from the group consisting of SEQ ID NO:72 and SEQ ID NO:73, and a VL domain comprising
[0599] (iv) a CDR-L1 comprising the amino acid sequence selected from the group consisting of SEQ ID NO:74 and SEQ ID NO:75,
[0600] (v) a CDR-L2 comprising the amino acid sequence selected from the group consisting of SEQ ID NO:76 and SEQ ID NO:77, and
[0601] (vi) a CDR-L3 comprising the amino acid sequence selected from the group consisting of SEQ ID NO:78 and SEQ ID NO:79.

[0602] 11. The bispecific antigen binding molecule of any one of claims 1 to 10, wherein
[0603] (i) each of the moieties capable of specific binding to OX40 comprises a heavy chain variable region VH comprising an amino acid sequence that is at least about 95%, 96%, 97%, 98%, 99% or 100% identical to the amino acid sequence of SEQ ID NO:25, SEQ ID NO: 27, SEQ ID NO:29, SEQ ID NO:31, SEQ ID NO:33, SEQ ID NO:35 or SEQ ID NO:37 and a light chain variable region comprising an amino acid sequence that is at least about 95%, 96%, 97%, 98%, 99% or 100% identical to the amino acid sequence of SEQ ID NO:26, SEQ ID NO: 28, SEQ ID NO:30, SEQ ID NO:32, SEQ ID NO:34, SEQ ID NO:36 or SEQ ID NO:38 and
[0604] (ii) the moiety capable of specific binding to FAP comprises a heavy chain variable region VH comprising an amino acid sequence that is at least about 95%, 96%, 97%, 98%, 99% or 100% identical to the amino acid sequence of SEQ ID NO:80 or SEQ ID NO:82 and a light chain variable region comprising an amino acid sequence that is at least about 95%, 96%, 97%, 98%, 99% or 100% identical to the amino acid sequence of SEQ ID NO:81 or SEQ ID NO:83.

[0605] 12. The bispecific antigen binding molecule of any one of claims 1 to 11, wherein the four moieties capable of specific binding to a costimulatory TNF receptor family member are Fab fragments and each two thereof are connected to each other.

[0606] 13. The bispecific antigen binding molecule of any one of claims 1 to 12, wherein a first Fab fragment capable of specific binding to a costimulatory TNF receptor family member is fused at the C-terminus of the CH1 domain to the VH domain of a second Fab fragment capable of specific binding to a costimulatory TNF receptor family member and a third Fab fragment capable of specific binding to a costimulatory TNF receptor family member is fused at the C-terminus of the CH1 domain to the VH domain of a fourth Fab fragment capable of specific binding to a costimulatory TNF receptor family member, optionally via a peptide linker.

[0607] 14. The bispecific antigen binding molecule of any one of claims 1 to 13, wherein in the Fab fragments capable of specific binding to a costimulatory TNF receptor family member in the constant domain CL the amino acid at position 124 is substituted independently by lysine (K), arginine (R) or histidine (H) (numbering according to Kabat EU Index), and in the constant domain CH1 the amino acids at positions 147 and 213 are substituted independently by glutamic acid (E) or aspartic acid (D) (numbering according to Kabat EU index).

[0608] 15. The bispecific antigen binding molecule of any one of claims 1 to 14, wherein the bispecific antigen binding molecule is tetravalent for the costimulatory TNF receptor family member and monovalent for the target cell antigen.

[0609] 16. The bispecific antigen binding molecule of any one of claims 1 to 15, wherein the moiety capable of specific binding to a target cell antigen comprises a VH and VL domain and wherein the VH domain is connected via a peptide linker to the C-terminus of the first subunit of the Fc domain and the VL domain is connected via a peptide linker to the C-terminus of the second subunit of the Fc domain.

[0610] 17. The bispecific antigen binding molecule of any one of claims 1 to 16, wherein the Fc domain comprises a modification promoting the association of the first and second subunit of the Fc domain.

[0611] 18. The bispecific antigen binding molecule of any one of claims 1 to 17, wherein the first subunit of the Fc domain comprises knobs and the second subunit of the Fc domain comprises holes according to the knobs into holes method.

[0612] 19. The bispecific antigen binding molecule of any one of claims 1 to 18, wherein the first subunit of the Fc domain comprises the amino acid substitutions S354C and T366W (numbering according to Kabat EU index) and the second subunit of the Fc domain comprises the amino acid substitutions Y349C, T366S and Y407V (numbering according to Kabat EU index).

[0613] 20. The bispecific antigen binding molecule of any one of claims 1 to 19, wherein said antigen binding molecule comprises

[0614] (i) a first heavy chain comprising an amino acid sequence of SEQ ID NO:213, a second heavy chain comprising an amino acid sequence of SEQ ID NO:214, and a light chain comprising an amino acid sequence of SEQ ID NO.157, or

[0615] (ii) a first heavy chain comprising an amino acid sequence of SEQ ID NO:217, a second heavy chain comprising an amino acid sequence of SEQ ID NO:218, and a light chain comprising an amino acid sequence of SEQ ID NO.157.

[0616] 21. The bispecific antigen binding molecule of any one of claims 1 to 14, wherein the bispecific antigen binding molecule is tetravalent for the costimulatory TNF receptor family member and bivalent for the target cell antigen.

[0617] 22. The bispecific antigen binding molecule of any one of claim 1 to 14 or 21, wherein the two moieties capable of specific binding to a target cell antigen are Fab fragments or crossover Fab fragments.

[0618] 23. The bispecific antigen binding molecule of any one of claims 1 to 14 or 21 to 22, wherein each of the Fab fragments or crossover Fab fragments capable of specific binding to a target cell antigen is fused at the N-terminus of the VH or VL domain via a peptide linker to the C-terminus of one of the subunits of the Fc domain.

[0619] 24. The bispecific antigen binding molecule of any one of claims 1 to 14 or 21 to 23, wherein the two moieties capable of specific binding to a target cell antigen are VH-VL crossover Fab fragments and are each fused at the N-terminus of the VL domain via a peptide linker to the C-terminus of one of the subunits of the Fc domain.

[0620] 25. The bispecific antigen binding molecule of any one of claims 1 to 14 or 21 to 24, wherein said antigen binding molecule comprises

[0621] (i) a heavy chain comprising an amino acid sequence of SEQ ID NO:227, a first light chain of SEQ ID NO:226 and a second light chain of SEQ ID NO:228.

[0622] 26. The bispecific antigen binding molecule of any one of claims 1 to 25, wherein the Fc domain is of human IgG1 subclass with the amino acid mutations L234A, L235A and P329G (numbering according to Kabat EU index).

[0623] 27. A polynucleotide encoding the bispecific antigen binding molecule of claims 1 to 26.

[0624] 28. A pharmaceutical composition comprising a bispecific antigen binding molecule of any one of claims 1 to 27, and at least one pharmaceutically acceptable excipient.

[0625] 29. The bispecific antigen binding molecule of any one of claims 1 to 25, or the pharmaceutical composition of claim 28, for use as a medicament.

[0626] 30. The bispecific antigen binding molecule of any one of claims 1 to 25, or the pharmaceutical composition of claim 28, for use

(i) in stimulating T cell response,
(ii) in supporting survival of activated T cells,
(iii) in the treatment of infections,
(iv) in the treatment of cancer,
(v) in delaying progression of cancer, or
(vi) in prolonging the survival of a patient suffering from cancer.

[0627] 31. The bispecific antigen binding molecule of any one of claims 1 to 25, or the pharmaceutical composition of claim 28, for use in the treatment of cancer.

[0628] 32. The bispecific antigen binding molecule of any one of claims 1 to 25, or the pharmaceutical composition of claim 28, for use in the treatment of cancer, wherein the bispecific antigen binding molecule is administered in combination with a chemotherapeutic agent, radiation and/or other agents for use in cancer immunotherapy.

[0629] 33. A method of inhibiting the growth of tumor cells in an individual comprising administering to the individual an effective amount of the bispecific antigen binding molecule of any one of claims 1 to 25, or the pharmaceutical composition of claim 28, to inhibit the growth of the tumor cells.

### EXAMPLES

[0630] The following are examples of methods and compositions of the invention. It is understood that various other embodiments may be practiced, given the general description provided above.

### Recombinant DNA Techniques

[0631] Standard methods were used to manipulate DNA as described in Sambrook et al., Molecular cloning: A laboratory manual; Cold Spring Harbor Laboratory Press, Cold Spring Harbor, N.Y., 1989. The molecular biological reagents were used according to the manufacturer's instructions. General information regarding the nucleotide sequences of human immunoglobulin light and heavy chains is given in: Kabat, E. A. et al., (1991) Sequences of Proteins of Immunological Interest, Fifth Ed., NIH Publication No 91-3242.

### DNA Sequencing

[0632] DNA sequences were determined by double strand sequencing.

### Gene Synthesis

[0633] Desired gene segments were either generated by PCR using appropriate templates or were synthesized by Geneart AG (Regensburg, Germany) from synthetic oligonucleotides and PCR products by automated gene synthesis. In cases where no exact gene sequence was available, oligonucleotide primers were designed based on sequences from closest homologues and the genes were isolated by RT-PCR from RNA originating from the appropriate tissue. The gene segments flanked by singular restriction endonuclease cleavage sites were cloned into standard cloning/sequencing vectors. The plasmid DNA was purified from transformed bacteria and concentration determined by UV spectroscopy. The DNA sequence of the subcloned gene fragments was confirmed by DNA sequencing. Gene segments were designed with suitable restriction sites to allow sub-cloning into the respective expression vectors. All constructs were designed with a 5′-end DNA sequence coding for a leader peptide which targets proteins for secretion in eukaryotic cells.

### Protein Purification

[0634] Proteins were purified from filtered cell culture supernatants referring to standard protocols. In brief, antibodies were applied to a Protein A Sepharose column (GE healthcare) and washed with PBS. Elution of antibodies was achieved at pH 2.8 followed by immediate neutralization of the sample. Aggregated protein was separated from monomeric antibodies by size exclusion chromatography (Superdex 200, GE Healthcare) in PBS or in 20 mM Histidine, 150 mM NaCl pH 6.0. Monomeric antibody fractions were pooled, concentrated (if required) using e.g., a MILLIPORE Amicon Ultra (30 MWCO) centrifugal concentrator, frozen and stored at −20° C. or −80° C. Part of the samples were provided for subsequent protein analytics and analytical characterization e.g. by SDS-PAGE, size exclusion chromatography (SEC) or mass spectrometry.

### SDS-PAGE

[0635] The NuPAGE® Pre-Cast gel system (Invitrogen) was used according to the manufacturer's instruction. In particular, 10% or 4-12% NuPAGE® Novex® Bis-TRIS Pre-Cast gels (pH 6.4) and a NuPAGE® MES (reduced gels, with NuPAGE® Antioxidant running buffer additive) or MOPS (non-reduced gels) running buffer was used.

### Analytical Size Exclusion Chromatography

[0636] Size exclusion chromatography (SEC) for the determination of the aggregation and oligomeric state of antibodies was performed by HPLC chromatography. Briefly, Protein A purified antibodies were applied to a Tosoh TSKgel G3000SW column in 300 mM NaCl, 50 mM KH₂PO₄/K₂HPO₄, pH 7.5 on an Agilent HPLC 1100 system or to a Superdex 200 column (GE Healthcare) in 2×PBS on a Dionex HPLC-System. The eluted protein was quantified by UV absorbance and integration of peak areas. BioRad Gel Filtration Standard 151-1901 served as a standard.

### Mass Spectrometry

[0637] This section describes the characterization of the multispecific antibodies with VH/VL or CH/CL exchange (CrossMabs) with emphasis on their correct assembly. The expected primary structures were analyzed by electrospray ionization mass spectrometry (ESI-MS) of the deglycosylated intact CrossMabs and deglycosylated/plasmin digested or alternatively deglycosylated/limited LysC digested CrossMabs.

[0638] The CrossMabs were deglycosylated with N-Glycosidase F in a phosphate or Tris buffer at 37° C. for up to 17 h at a protein concentration of 1 mg/ml. The plasmin or limited LysC (Roche) digestions were performed with 100 μg deglycosylated VH/VL CrossMabs in a Tris buffer pH 8 at room temperature for 120 hours and at 37° C. for 40 min, respectively. Prior to mass spectrometry the samples were desalted via HPLC on a Sephadex G25 column (GE Healthcare). The total mass was determined via ESI-MS on a maXis 4G UHR-QTOF MS system (Bruker Daltonik) equipped with a TriVersa NanoMate source (Advion).

### Example 1

### Generation of Ox40 Antibodies and Tool Binders

### 1.1 Preparation, Purification and Characterization of Antigens and Screening Tools for the Generation of Novel OX40 Binders by Phage Display

[0639] DNA sequences encoding the ectodomains of human, mouse or cynomolgus OX40 (Table 1) were subcloned in frame with the human IgG1 heavy chain CH2 and CH3 domains on the knob (Merchant et al., 1998). An AcTEV protease cleavage site was introduced between an antigen ectodomain and the Fc of human IgG1. An Avi tag for directed biotinylation was introduced at the C-terminus of the antigen-Fc knob. Combination of the antigen-Fc knob chain containing the S354C/T366W mutations, with a Fc hole chain containing the Y349C/T366S/L368A/Y407V mutations allows generation of a heterodimer which includes a single copy of the OX40 ectodomain containing chain, thus creating a monomeric form of Fc-linked antigen (FIG. 1A). Table 1 shows the amino acid sequences of the various OX40 ectodomains. Table 2 the cDNA and amino acid sequences of monomeric antigen Fc(kih) fusion molecules as depicted in FIG. 1A.

TABLE 1
Amino acid numbering of antigen ectodomains (ECD) and their origin

| SEQ ID NO: | Construct | Origin | ECD |
|---|---|---|---|
| 1 | human OX40 ECD | Synthetized | aa 29-214 |
| | | according to | |
| | | P43489 | |
| 93 | cynomolgus OX40 ECD | Isolated from | aa 29-214 |
| | | cynomolgus blood | |
| 94 | murine OX40 ECD | Synthetized | aa 10-211 |
| | | according to | |
| | | P47741 | |

TABLE 2
cDNA and amino acid sequences of monomeric antigen Fc(kih)
fusion molecules (produced by combination of one Fc hole chain
with one antigen Fc knob chain)

| SEQ ID NO: | Antigen | Sequence |
|---|---|---|
| 95 | Nucleotide | GACAAAACTCACACATGCCCACCGTGCCCAGCACCTGA |
| | sequence | ACTCCTGGGGGGACCGTCAGTCTTCCTCTTCCCCCCAA |
| | Fc hole chain | AACCCAAGGACACCCTCATGATCTCCCGGACCCCTGAG |
| | | GTCACATGCGTGGTGGTGGACGTGAGCCACGAAGACC |
| | | CTGAGGTCAAGTTCAACTGGTACGTGGACGGCGTGGAG |
| | | GTGCATAATGCCAAGACAAAGCCGCGGGAGGAGCAGT |
| | | ACAACAGCACGTACCGTGTGGTCAGCGTCCTCACCGTC |
| | | CTGCACCAGGACTGGCTGAATGGCAAGGAGTACAAGT |
| | | GCAAGGTCTCCAACAAAGCCCTCCCAGCCCCCATCGAG |
| | | AAAACCATCTCCAAAGCCAAAGGGCAGCCCCGAGAAC |
| | | CACAGGTGTGCACCCTGCCCCCATCCCGGGATGAGCTG |
| | | ACCAAGAACCAGGTCAGCCTCTCGTGCGCAGTCAAAG |
| | | GCTTCTATCCCAGCGACATCGCCGTGGAGTGGGAGAGC |
| | | AATGGGCAGCCGGAGAACAACTACAAGACCACGCCTC |
| | | CCGTGCTGGACTCCGACGGCTCCTTCTTCCTCGTGAGC |
| | | AAGCTCACCGTGGACAAGAGCAGGTGGCAGCAGGGGA |
| | | ACGTCTTCTCATGCTCCGTGATGCATGAGGCTCTGCAC |
| | | AACCACTACACGCAGAAGAGCCTCTCCCTGTCTCCGGG |
| | | TAAA |
| 96 | Nucleotide | CTGCACTGCGTGGGCGACACCTACCCCAGCAACGACCG |
| | sequence | GTGCTGCCACGAGTGCAGACCCGGCAACGGCATGGTGT |
| | human OX40 | CCCGGTGCAGCCGGTCCCAGAACACCGTGTGCAGACCT |
| | antigen Fc knob | TGCGGCCCTGGCTTCTACAACGACGTGGTGTCCAGCAA |
| | chain | GCCCTGCAAGCCTTGTACCTGGTGCAACCTGCGGAGCG |
| | | GCAGCGAGCGGAAGCAGCTGTGTACCGCCACCCAGGA |
| | | TACCGTGTGCCGGTGTAGAGCCGGCACCCAGCCCCTGG |
| | | ACAGCTACAAACCCGGCGTGGACTGCGCCCCTTGCCCT |
| | | CCTGGCCACTTCAGCCCTGGCGACAACCAGGCCTGCAA |
| | | GCCTTGGACCAACTGCACCCTGGCCGGCAAGCACACCC |
| | | TGCAGCCCGCCAGCAATAGCAGCGACGCCATCTGCGA |
| | | GGACCGGGATCCTCCTGCCACCCAGCCTCAGGAAACCC |
| | | AGGGCCCTCCCGCCAGACCCATCACCGTGCAGCCTACA |
| | | GAGGCCTGGCCCAGAACCAGCCAGGGGCCTAGCACCA |
| | | GACCCGTGGAAGTGCCTGGCGGCAGAGCCGTCGACGA |
| | | ACAGTTATATTTTCAGGGCGGCTCACCCAAATCTGCAG |
| | | ACAAAACTCACACATGCCCACCGTGCCCAGCACCTGAA |
| | | CTCCTGGGGGGACCGTCAGTCTTCCTCTTCCCCCCAAA |
| | | ACCCAAGGACACCCTCATGATCTCCCGGACCCCTGAGG |
| | | TCACATGCGTGGTGGTGGACGTGAGCCACGAAGACCCT |
| | | GAGGTCAAGTTCAACTGGTACGTGGACGGCGTGGAGG |
| | | TGCATAATGCCAAGACAAAGCCGCGGGAGGAGCAGTA |
| | | CAACAGCACGTACCGTGTGGTCAGCGTCCTCACCGTCC |
| | | TGCACCAGGACTGGCTGAATGGCAAGGAGTACAAGTG |
| | | CAAGGTCTCCAACAAAGCCCTCCCAGCCCCCATCGAGA |
| | | AAACCATCTCCAAAGCCAAAGGGCAGCCCCGAGAACC |
| | | ACAGGTGTACACCCTGCCCCCATGCCGGGATGAGCTGA |
| | | CCAAGAACCAGGTCAGCCTGTGGTGCCTGGTCAAAGGC |
| | | TTCTATCCCAGCGACATCGCCGTGGAGTGGGAGAGCAA |
| | | TGGGCAGCCGGAGAACAACTACAAGACCACGCCTCCC |
| | | GTGCTGGACTCCGACGGCTCCTTCTTCCTCTACAGCAA |
| | | GCTCACCGTGGACAAGAGCAGGTGGCAGCAGGGGAAC |
| | | GTCTTCTCATGCTCCGTGATGCATGAGGCTCTGCACAA |
| | | CCACTACACGCAGAAGAGCCTCTCCCTGTCTCCGGGTA |
| | | AATCCGGAGGCCTGAACGACATCTTCGAGGCCCAGAA |
| | | GATTGAATGGCACGAG |
| 97 | Nucleotide | CTCCACTGTGTCGGGGACACCTACCCCAGCAACGACCG |
| | sequence | GTGCTGTCAGGAGTGCAGGCCAGGCAACGGGATGGTG |
| | cynomolgus | AGCCGCTGCAACCGCTCCCAGAACACGGTGTGCCGTCC |
| | OX40 antigen | GTGCGGGCCCGGCTTCTACAACGACGTGGTCAGCGCCA |
| | Fc knob chain | AGCCCTGCAAGGCCTGCACATGGTGCAACCTCAGAAGT |
| | | GGGAGTGAGCGGAAACAGCCGTGCACGGCCACACAGG |
| | | ACACAGTCTGCCGCTGCCGGGCGGGCACCCAGCCCCTG |
| | | GACAGCTACAAGCCTGGAGTTGACTGTGCCCCCTGCCC |
| | | TCCAGGGCACTTCTCCCCGGGCGACAACCAGGCCTGCA |
| | | AGCCCTGGACCAACTGCACCTTGGCCGGGAAGCACACC |
| | | CTGCAGCCAGCCAGCAATAGCTCGGACGCCATCTGTGA |
| | | GGACAGGGACCCCCCACCCACACAGCCCCAGGAGACC |
| | | CAGGGCCCCCCGGCCAGGCCCACCACTGTCCAGCCCAC |
| | | TGAAGCCTGGCCCAGAACCTCACAGAGACCCTCCACCC |
| | | GGCCCGTGGAGGTCCCCAGGGGCCCTGCGGTCGACGA |
| | | ACAGTTATATTTTCAGGGCGGCTCACCCAAATCTGCAG |
| | | ACAAAACTCACACATGCCCACCGTGCCCAGCACCTGAA |
| | | CTCCTGGGGGGACCGTCAGTCTTCCTCTTCCCCCCAAA |
| | | ACCCAAGGACACCCTCATGATCTCCCGGACCCCTGAGG |
| | | TCACATGCGTGGTGGTGGACGTGAGCCACGAAGACCCT |
| | | GAGGTCAAGTTCAACTGGTACGTGGACGGCGTGGAGG |
| | | TGCATAATGCCAAGACAAAGCCGCGGGAGGAGCAGTA |
| | | CAACAGCACGTACCGTGTGGTCAGCGTCCTCACCGTCC |
| | | TGCACCAGGACTGGCTGAATGGCAAGGAGTACAAGTG |
| | | CAAGGTCTCCAACAAAGCCCTCCCAGCCCCCATCGAGA |
| | | AAACCATCTCCAAAGCCAAAGGGCAGCCCCGAGAACC |
| | | ACAGGTGTACACCCTGCCCCCATGCCGGGATGAGCTGA |
| | | CCAAGAACCAGGTCAGCCTGTGGTGCCTGGTCAAAGGC |
| | | TTCTATCCCAGCGACATCGCCGTGGAGTGGGAGAGCAA |
| | | TGGGCAGCCGGAGAACAACTACAAGACCACGCCTCCC |
| | | GTGCTGGACTCCGACGGCTCCTTCTTCCTCTACAGCAA |
| | | GCTCACCGTGGACAAGAGCAGGTGGCAGCAGGGGAAC |
| | | GTCTTCTCATGCTCCGTGATGCATGAGGCTCTGCACAA |
| | | CCACTACACGCAGAAGAGCCTCTCCCTGTCTCCGGGTA |
| | | AATCCGGAGGCCTGAACGACATCTTCGAGGCCCAGAA |
| | | GATTGAATGGCACGAG |
| 98 | Nucleotide | GTGACCGCCAGACGGCTGAACTGCGTGAAGCACACCT |
| | sequence | ACCCCAGCGGCCACAAGTGCTGCAGAGAGTGCCAGCC |
| | murine OX40 | CGGCCACGGCATGGTGTCCAGATGCGACCACACACGG |
| | antigen Fc knob | GACACCCTGTGCCACCCTTGCGAGACAGGCTTCTACAA |
| | chain | CGAGGCCGTGAACTACGATACCTGCAAGCAGTGCACCC |
| | | AGTGCAACCACAGAAGCGGCAGCGAGCTGAAGCAGAA |
| | | CTGCACCCCCACCCAGGATACCGTGTGCAGATGCAGAC |
| | | CCGGCACCCAGCCCAGACAGGACAGCGGCTACAAGCT |
| | | GGGCGTGGACTGCGTGCCCTGCCCTCCTGGCCACTTCA |
| | | GCCCCGGCAACAACCAGGCCTGCAAGCCCTGGACCAA |
| | | CTGCACCCTGAGCGGCAAGCAGACCAGACACCCCGCC |
| | | AGCGACAGCCTGGATGCCGTGTGCGAGGACAGAAGCC |
| | | TGCTGGCCACCCTGCTGTGGGAGACACAGCGGCCCACC |
| | | TTCAGACCCACCACCGTGCAGAGCACCACCGTGTGGCC |
| | | CAGAACCAGCGAGCTGCCCAGTCCTCCTACCCTCGTGA |
| | | CACCTGAGGGCCCCGTCGACGAACAGTTATATTTTCAG |
| | | GGCGGCTCACCCAAATCTGCAGACAAAACTCACACATG |
| | | CCCACCGTGCCCAGCACCTGAACTCCTGGGGGGACCGT |
| | | CAGTCTTCCTCTTCCCCCCAAAACCCAAGGACACCCTC |
| | | ATGATCTCCCGGACCCCTGAGGTCACATGCGTGGTGGT |
| | | GGACGTGAGCCACGAAGACCCTGAGGTCAAGTTCAAC |
| | | TGGTACGTGGACGGCGTGGAGGTGCATAATGCCAAGA |
| | | CAAAGCCGCGGGAGGAGCAGTACAACAGCACGTACCG |
| | | TGTGGTCAGCGTCCTCACCGTCCTGCACCAGGACTGGC |
| | | TGAATGGCAAGGAGTACAAGTGCAAGGTCTCCAACAA |
| | | AGCCCTCCCAGCCCCCATCGAGAAAACCATCTCCAAAG |
| | | CCAAAGGGCAGCCCCGAGAACCACAGGTGTACACCCT |
| | | GCCCCCATGCCGGGATGAGCTGACCAAGAACCAGGTC |
| | | AGCCTGTGGTGCCTGGTCAAAGGCTTCTATCCCAGCGA |
| | | CATCGCCGTGGAGTGGGAGAGCAATGGGCAGCCGGAG |
| | | AACAACTACAAGACCACGCCTCCCGTGCTGGACTCCGA |
| | | CGGCTCCTTCTTCCTCTACAGCAAGCTCACCGTGGACA |
| | | AGAGCAGGTGGCAGCAGGGGAACGTCTTCTCATGCTCC |
| | | GTGATGCATGAGGCTCTGCACAACCACTACACGCAGAA |
| | | GAGCCTCTCCCTGTCTCCGGGTAAATCCGGAGGCCTGA |
| | | ACGACATCTTCGAGGCCCAGAAGATTGAATGGCACGAG |
| 99 | Fc hole chain | DKTHTCPPCPAPELLGGPSVFLFPPKPKDTLMISRTPEVTC |
| | | VVVDVSHEDPEVKFNWYVDGVEVHNAKTKPREEQYNST |
| | | YRVVSVLTVLHQDWLNGKEYKCKVSNKALPAPIEKTISK |
| | | AKGQPREPQVCTLPPSRDELTKNQVSLSCAVKGFYPSDIA |
| | | VEWESNGQPENNYKTTPPVLDSDGSFFLVSKLTVDKSRW |
| | | QQGNVFSCSVMHEALHNHYTQKSLSLSPGK |
| 100 | human OX40 | LHCVGDTYPSNDRCCHECRPGNGMVSRCSRSQNTVCRPC |
| | antigen Fc knob | GPGFYNDVVSSKPCKPCTWCNLRSGSERKQLCTATQDTV |
| | chain | CRCRAGTQPLDSYKPGVDCAPCPPGHFSPGDNQACKPWT |
| | | NCTLAGKHTLQPASNSSDAICEDRDPPATQPQETQGPPAR |
| | | PITVQPTEAWPRTSQGPSTRPVEVPGGRAVDEQLYFQGGS |
| | | PKSADKTHTCPPCPAPELLGGPSVFLFPPKPKDTLMISRTP |
| | | EVTCVVVDVSHEDPEVKFNWYVDGVEVHNAKTKPREEQ |
| | | YNSTYRVVSVLTVLHQDWLNGKEYKCKVSNKALPAPIEK |
| | | TISKAKGQPREPQVYTLPPCRDELTKNQVSLWCLVKGFYP |
| | | SDIAVEWESNGQPENNYKTTPPVLDSDGSFFLYSKLTVDK |
| | | SRWQQGNVFSCSVMHEALHNHYTQKSLSLSPGKSGGLN |
| | | DIFEAQKIEWHE |
| 101 | cynomolgus | LHCVGDTYPSNDRCCQECRPGNGMVSRCNRSQNTVCRP |
| | OX40 antigen | CGPGFYNDVVSAKPCKACTWCNLRSGSERKQPCTATQDT |
| | Fc knob chain | VCRCRAGTQPLDSYKPGVDCAPCPPGHFSPGDNQACKPW |
| | | TNCTLAGKHTLQPASNSSDAICEDRDPPPTQPQETQGPPA |
| | | RPTTVQPTEAWPRTSQRPSTRPVEVPRGPAVDEQLYFQGG |
| | | SPKSADKTHTCPPCPAPELLGGPSVFLFPPKPKDTLMISRT |
| | | PEVTCVVVDVSHEDPEVKFNWYVDGVEVHNAKTKPREE |
| | | QYNSTYRVVSVLTVLHQDWLNGKEYKCKVSNKALPAPIE |
| | | KTISKAKGQPREPQVYTLPPCRDELTKNQVSLWCLVKGF |
| | | YPSDIAVEWESNGQPENNYKTTPPVLDSDGSFFLYSKLTV |
| | | DKSRWQQGNVFSCSVMHEALHNHYTQKSLSLSPGKSGG |
| | | LNDIFEAQKIEWHE |
| 102 | murine OX40 | VTARRLNCVKHTYPSGHKCCRECQPGHGMVSRCDHTRD |
| | antigen Fc knob | TLCHPCETGFYNEAVNYDTCKQCTQCNHRSGSELKQNCT |
| | chain | PTQDTVCRCRPGTQPRQDSGYKLGVDCVPCPPGHFSPGN |
| | | NQACKPWTNCTLSGKQTRHPASDSLDAVCEDRSLLATLL |
| | | WETQRPTFRPTTVQSTTVWPRTSELPSPPTLVTPEGPVDE |
| | | QLYFQGGSPKSADKTHTCPPCPAPELLGGPSVFLFPPKPK |
| | | DTLMISRTPEVTCVVVDVSHEDPEVKFNWYVDGVEVHN |
| | | AKTKPREEQYNSTYRVVSVLTVLHQDWLNGKEYKCKVS |
| | | NKALPAPIEKTISKAKGQPREPQVYTLPPCRDELTKNQVS |
| | | LWCLVKGFYPSDIAVEWESNGQPENNYKTTPPVLDSDGS |
| | | FFLYSKLTVDKSRWQQGNVFSCSVMHEALHNHYTQKSLS |
| | | LSPGKSGGLNDIFEAQKIEWHE |

[0640] All OX40-Fc-fusion encoding sequences were cloned into a plasmid vector driving expression of the insert from an MPSV promoter and containing a synthetic polyA signal sequence located at the 3′ end of the CDS. In addition, the vector contained an EBV OriP sequence for episomal maintenance of the plasmid.

[0641] For preparation of the biotinylated monomeric antigen/Fc fusion molecules, exponentially growing suspension HEK293 EBNA cells were co-transfected with three vectors encoding the two components of fusion protein (knob and hole chains) as well as BirA, an enzyme necessary for the biotinylation reaction. The corresponding vectors were used at a 2:1:0.05 ratio (“antigen ECD-AcTEV-Fc knob”:“Fc hole”:“BirA”).

[0642] For protein production in 500 ml shake flasks, 400 million HEK293 EBNA cells were seeded 24 hours before transfection. For transfection cells were centrifuged for 5 minutes at 210 g, and supernatant was replaced by pre-warmed CD CHO medium. Expression vectors were resuspended in 20 mL of CD CHO medium containing 200 μg of vector DNA. After addition of 540 μL of polyethylenimine (PEI), the solution was vortexed for 15 seconds and incubated for 10 minutes at room temperature. Afterwards, cells were mixed with the DNA/PEI solution, transferred to a 500 mL shake flask and incubated for 3 hours at 37° C. in an incubator with a 5% CO₂ atmosphere. After the incubation, 160 mL of F17 medium was added and cells were cultured for 24 hours. One day after transfection, 1 mM valproic acid and 7% Feed were added to the culture. After 7 days of culturing, the cell supernatant was collected by spinning down cells for 15 min at 210 g. The solution was sterile filtered (0.22 μm filter), supplemented with sodium azide to a final concentration of 0.01% (w/v), and kept at 4° C.

[0643] Secreted proteins were purified from cell culture supernatants by affinity chromatography using Protein A, followed by size exclusion chromatography. For affinity chromatography, the supernatant was loaded on a HiTrap ProteinA HP column (CV=5 mL, GE Healthcare) equilibrated with 40 mL 20 mM sodium phosphate, 20 mM sodium citrate pH 7.5. Unbound protein was removed by washing with at least 10 column volumes of a buffer containing 20 mM sodium phosphate, 20 mM sodium citrate and 0.5 M sodium chloride (pH 7.5). The bound protein was eluted using a linear pH-gradient of sodium chloride (from 0 to 500 mM) created over 20 column volumes of 20 mM sodium citrate, 0.01% (v/v) Tween-20, pH 3.0. The column was then washed with 10 column volumes of a solution containing 20 mM sodium citrate, 500 mM sodium chloride and 0.01% (v/v) Tween-20, pH 3.0.

[0644] The pH of the collected fractions was adjusted by adding 1/40 (v/v) of 2M Tris, pH8.0. The protein was concentrated and filtered prior to loading on a HiLoad Superdex 200 column (GE Healthcare) equilibrated with 2 mM MOPS, 150 mM sodium chloride, 0.02% (w/v) sodium azide solution of pH 7.4.

1.2 Selection of Ox40-Specific 8H9, 20B7, 49B4, 1G4, CLC-563, CLC-564 and 17A9 Antibodies from Generic Fab and Common Light Chain Libraries

[0645] Anti-OX40 antibodies were selected from three different generic phage display libraries: DP88-4 (clones 20B7, 8H9 1G4 and 49B4), the common light chain library Vk3_20/VH3_23 (clones CLC-563 and CLC-564) and lambda-DP47 (clone 17A9).

[0646] The DP88-4 library was constructed on the basis of human germline genes using the V-domain pairing Vk1_5 (kappa light chain) and VH1_69 (heavy chain) comprising randomized sequence space in CDR3 of the light chain (L3, 3 different lengths) and CDR3 of the heavy chain (H3, 3 different lengths). Library generation was performed by assembly of 3 PCR-amplified fragments applying splicing by overlapping extension (SOE) PCR. Fragment 1 comprises the 5′ end of the antibody gene including randomized L3, fragment 2 is a central constant fragment spanning from L3 to H3 whereas fragment 3 comprises randomized H3 and the 3′ portion of the antibody gene. The following primer combinations were used to generate these library fragments for DP88-4 library: fragment 1 (forward primer LMB3 combined with reverse primers Vk1_5_L3r_S or Vk1_5_L3r_SY or Vk1_5_L3r_SPY), fragment 2 (forward primer RJH31 combined with reverse primer RJH32) and fragment 3 (forward primers DP88-v4-4 or DP88-v4-6 or DP88-v4-8 combined with reverse primer fdseqlong), respectively. PCR parameters for production of library fragments were 5 min initial denaturation at 94° C., 25 cycles of 1 min 94° C., 1 min 58° C., 1 min 72° C. and terminal elongation for 10 min at 72° C. For assembly PCR, using equimolar ratios of the gel-purified single fragments as template, parameters were 3 min initial denaturation at 94° C. and 5 cycles of 30 s 94° C., 1 min 58° C., 2 min 72° C. At this stage, outer primers (LMB3 and fdseqlong) were added and additional 20 cycles were performed prior to a terminal elongation for 10 min at 72° C. After assembly of sufficient amounts of full length randomized Fab constructs, they were digested NcoI/NheI and ligated into similarly treated acceptor phagemid vector. Purified ligations were used for ˜60 transformations into electrocompetent E. coli TG1. Phagemid particles displaying the Fab library were rescued and purified by PEG/NaCl purification to be used for selections. These library construction steps were repeated three times to obtain a final library size of 4.4×109. Percentages of functional clones, as determined by C-terminal tag detection in dot blot, were 92.6% for the light chain and 93.7% for the heavy chain, respectively.

[0647] The common light chain library Vk3_20/VH3_23 was constructed on the basis of human germline genes using the V-domain pairing Vk3_20 (kappa light chain) and VH3_23 (heavy chain) comprising a constant non-randomized common light chain Vk3_20 and randomized sequence space in CDR3 of the heavy chain (H3, 3 different lengths). Library generation was performed by assembly of 2 PCR-amplified fragments applying splicing by overlapping extension (SOE) PCR. Fragment 1 is a constant fragment spanning from L3 to H3 whereas fragment 2 comprises randomized H3 and the 3′ portion of the antibody gene. The following primer combinations were used to generate these library fragments for the Vk3_20/VH3_23 common light chain library: fragment 1 (forward primer MS64 combined with reverse primer DP47CDR3_ba (mod.)) and fragment 2 (forward primers DP47-v4-4, DP47-v4-6, DP47-v4-8 combined with reverse primer fdseqlong), respectively. PCR parameters for production of library fragments were 5 min initial denaturation at 94° C., 25 cycles of 1 min 94° C., 1 min 58° C., 1 min 72° C. and terminal elongation for 10 min at 72° C. For assembly PCR, using equimolar ratios of the gel-purified single fragments as template, parameters were 3 min initial denaturation at 94° C. and 5 cycles of 30 s 94° C., 1 min 58° C., 2 min 72° C. At this stage, outer primers (MS64 and fdseqlong) were added and additional 18 cycles were performed prior to a terminal elongation for 10 min at 72° C. After assembly of sufficient amounts of full length randomized VH constructs, they were digested MunI/NotI and ligated into similarly treated acceptor phagemid vector. Purified ligations were used for ˜60 transformations into electrocompetent E. coli TG1. Phagemid particles displaying the Fab library were rescued and purified by PEG/NaCl purification to be used for selections. A final library size of 3.75×109 was obtained. Percentages of functional clones, as determined by C-terminal tag detection in dot blot, were 98.9% for the light chain and 89.5% for the heavy chain, respectively.

[0648] The lambda-DP47 library was constructed on the basis of human germline genes using the following V-domain pairings: V13_19 lambda light chain with VH3_23 heavy chain. The library was randomized in CDR3 of the light chain (L3) and CDR3 of the heavy chain (H3) and was assembled from 3 fragments by “splicing by overlapping extension” (SOE) PCR. Fragment 1 comprises the 5′ end of the antibody gene including randomized L3, fragment 2 is a central constant fragment spanning from the end of L3 to the beginning of H3 whereas fragment 3 comprises randomized H3 and the 3′ portion of the Fab fragment. The following primer combinations were used to generate library fragments for library: fragment 1 (LMB3-V1_3_19_L3r_V/V1_3_19_L3r_HV/V1_3_19_L3r_HLV), fragment 2 (RJH80-DP47CDR3_ba (mod)) and fragment 3 (DP47-v4-4/DP47-v4-6/DP47-v4-8-fdseqlong). PCR parameters for production of library fragments were 5 min initial denaturation at 94° C., 25 cycles of 60 sec at 94° C., 60 sec at 55° C., 60 sec at 72° C. and terminal elongation for 10 min at 72° C. For assembly PCR, using equimolar ratios of the 3 fragments as template, parameters were 3 min initial denaturation at 94° C. and 5 cycles of 60 sec at 94° C., 60 sec at 55° C., 120 sec at 72° C. At this stage, outer primers were added and additional 20 cycles were performed prior to a terminal elongation for 10 min at 72° C. After assembly of sufficient amounts of full length randomized Fab fragments, they were digested with NcoI/NheI alongside with similarly treated acceptor phagemid vector. 15 ug of Fab library insert were ligated with 13.3 ug of phagemid vector. Purified ligations were used for 60 transformations resulting in 1.5×10⁹ transformants. Phagemid particles displaying the Fab library were rescued and purified by PEG/NaCl purification to be used for selections.

[0649] Human OX40 (CD134) as antigen for the phage display selections was transiently expressed as N-terminal monomeric Fc-fusion in HEK EBNA cells and in vivo site-specifically biotinylated via co-expression of BirA biotin ligase at the avi-tag recognition sequence located at the C-terminus of the Fc portion carrying the receptor chain (Fc knob chain).

[0650] Selection rounds (biopanning) were performed in solution according to the following pattern:

1. Pre-clearing of ˜1012 phagemid particles on maxisorp plates coated with 10 ug/ml of an unrelated human IgG to deplete the libraries of antibodies recognizing the Fc-portion of the antigen,
2. incubation of the non-binding phagemid particles with 100 nM biotinylated human OX40 for 0.5 h in the presence of 100 nM unrelated non-biotinylated Fc knob-into-hole construct for further depletion of Fc-binders in a total volume of 1 ml,
3. capture of biotinylated hu OX40 and attached specifically binding phage by transfer to 4 wells of a neutravidin pre-coated microtiter plate for 10 min (in rounds 1 & 3),
4. washing of respective wells using 5×PBS/Tween20 and 5×PBS,
5. elution of phage particles by addition of 250 ul 100 mM TEA (triethylamine) per well for 10 min and neutralization by addition of 500 ul 1M Tris/HCl pH 7.4 to the pooled eluates from 4 wells,
6. post-clearing of neutralized eluates by incubation on neutravidin pre-coated microtiter plate with 100 nM biotin-captured Fc knob-into-hole construct for final removal of Fc-binders,
7. re-infection of log-phase E. coli TG1 cells with the supernatant of eluted phage particles, infection with helperphage VCSM13, incubation on a shaker at 30° C. over night and subsequent PEG/NaCl precipitation of phagemid particles to be used in the next selection round.

[0651] Selections were carried out over 3 or 4 rounds using constant antigen concentrations of 100 nM. In order to increase the likelihood for binders that are cross-reactive not only to cynomolgus OX40 but also murine OX40, in some selection rounds the murine target was used instead of the human OX40. In rounds 2 and 4, in order to avoid enrichment of binders to neutravidin, capture of antigen: phage complexes was performed by addition of 5.4×107 streptavidin-coated magnetic beads. Specific binders were identified by ELISA as follows: 100 ul of 25 nM biotinylated human OX40 and 10 ug/ml of human IgG were coated on neutravidin plates and maxisorp plates, respectively. Fab-containing bacterial supernatants were added and binding Fabs were detected via their Flag-tags using an anti-Flag/HRP secondary antibody. Clones exhibiting signals on human OX40 and being negative on human IgG were short-listed for further analyses and were also tested in a similar fashion against cynomolgus and murine OX40. They were bacterially expressed in a 0.5 liter culture volume, affinity purified and further characterized by SPR-analysis using BioRad's ProteOn XPR36 biosensor.

[0652] Table 3 shows the sequence of generic phage-displayed antibody library (DP88-4), Table 4 provides cDNA and amino acid sequences of library DP88-4 germline template and Table 5 shows the Primer sequences used for generation of DP88-4 germline template.

TABLE 3
Sequence of generic phage-displayed antibody library (DP88-4)

| SEQ ID | | |
|---|---|---|
| NO: | Description | Sequence |
| 103 | nucleotide | TGAAATACCTATTGCCTACGGCAGCCGCTGGATTGTTATTACT |
| | sequence of | CGCGGCCCAGCCGGCCATGGCCGACATCCAGATGACCCAGTC |
| | pRJH33 | TCCTTCCACCCTGTCTGCATCTGTAGGAGACCGTGTCACCATC |
| | library | ACTTGCCGTGCCAGTCAGAGTATTAGTAGCTGGTTGGCCTGG |
| | template | TATCAGCAGAAACCAGGGAAAGCCCCTAAGCTCCTGATCTAT |
| | DP88-4 | GATGCCTCCAGTTTGGAAAGTGGGGTCCCATCACGTTTCAGC |
| | library; | GGCAGTGGATCCGGGACAGAATTCACTCTCACCATCAGCAGC |
| | complete | TTGCAGCCTGATGATTTTGCAACTTATTACTGCCAACAGTATA |
| | Fab coding | ATAGTTATTCTACGTTTGGCCAGGGCACCAAAGTCGAGATCA |
| | region | AGCGTACGGTGGCTGCACCATCTGTCTTCATCTTCCCGCCATC |
| | comprising | TGATGAGCAGTTGAAATCTGGAACTGCCTCTGTTGTGTGCCTG |
| | PelB leader | CTGAATAACTTCTATCCCAGAGAGGCCAAAGTACAGTGGAAG |
| | sequence + | GTGGATAACGCCCTCCAATCGGGTAACTCCCAGGAGAGTGTC |
| | Vk1_5 | ACAGAGCAGGACAGCAAGGACAGCACCTACAGCCTCAGCAG |
| | kappa V- | CACCCTGACGCTGAGCAAAGCAGACTACGAGAAACACAAAG |
| | domain + | TCTACGCCTGCGAAGTCACCCATCAGGGCCTGAGCTCGCCCG |
| | CL constant | TCACAAAGAGCTTCAACAGGGGAGAGTGTGGAGCCGCAGAA |
| | domain for | CAAAAACTCATCTCAGAAGAGGATCTGAATGGAGCCGCAGA |
| | light chain | CTACAAGGACGACGACGACAAGGGTGCCGCATAATAAGGCG |
| | and PelB + | CGCCAATTCTATTTCAAGGAGACAGTCATATGAAATACCTGC |
| | VH1_69 V- | TGCCGACCGCTGCTGCTGGTCTGCTGCTCCTCGCTGCCCAGCC |
| | domain + | GGCGATGGCCCAGGTGCAATTGGTGCAGTCTGGGGCTGAGGT |
| | CH1 | GAAGAAGCCTGGGTCCTCGGTGAAGGTCTCCTGCAAGGCCTC |
| | constant | CGGAGGCACATTCAGCAGCTACGCTATAAGCTGGGTGCGACA |
| | domain for | GGCCCCTGGACAAGGGCTCGAGTGGATGGGAGGGATCATCCC |
| | heavy chain | TATCTTTGGTACAGCAAACTACGCACAGAAGTTCCAGGGCAG |
| | including | GGTCACCATTACTGCAGACAAATCCACGAGCACAGCCTACAT |
| | tags | GGAGCTGAGCAGCCTGAGATCTGAGGACACCGCCGTGTATTA |
| | | CTGTGCGAGACTATCCCCAGGCGGTTACTATGTTATGGATGC |
| | | CTGGGGCCAAGGGACCACCGTGACCGTCTCCTCAGCTAGCAC |
| | | CAAAGGCCCATCGGTCTTCCCCCTGGCACCCTCCTCCAAGAG |
| | | CACCTCTGGGGGCACAGCGGCCCTGGGCTGCCTGGTCAAGGA |
| | | CTACTTCCCCGAACCGGTGACGGTGTCGTGGAACTCAGGCGC |
| | | CCTGACCAGCGGCGTGCACACCTTCCCGGCTGTCCTACAGTC |
| | | CTCAGGACTCTACTCCCTCAGCAGCGTGGTGACCGTGCCCTCC |
| | | AGCAGCTTGGGCACCCAGACCTACATCTGCAACGTGAATCAC |
| | | AAGCCCAGCAACACCAAAGTGGACAAGAAAGTTGAGCCCAA |
| | | ATCTTGTGACGCGGCCGCAAGCACTAGTGCCCATCACCATCA |
| | | CCATCACGCCGCGGCA |

TABLE 4
cDNA and amino acid sequences of library DP88-4 germline
template

| SEQ ID | | |
|---|---|---|
| NO: | Description | Sequence |
| 104 | nucleotide | GACATCCAGATGACCCAGTCTCCTTCCACCCTGTCTG |
| | sequence of | CATCTGTAGGAGACCGTGTCACCATCACTTGCCGTG |
| | Fab light chain | CCAGTCAGAGTATTAGTAGCTGGTTGGCCTGGTATC |
| | Vk1_5 | AGCAGAAACCAGGGAAAGCCCCTAAGCTCCTGATCT |
| | | ATGATGCCTCCAGTTTGGAAAGTGGGGTCCCATCAC |
| | | GTTTCAGCGGCAGTGGATCCGGGACAGAATTCACTC |
| | | TCACCATCAGCAGCTTGCAGCCTGATGATTTTGCAA |
| | | CTTATTACTGCCAACAGTATAATAGTTATTCTACGTT |
| | | TGGCCAGGGCACCAAAGTCGAGATCAAGCGTACGG |
| | | TGGCTGCACCATCTGTCTTCATCTTCCCGCCATCTGA |
| | | TGAGCAGTTGAAATCTGGAACTGCCTCTGTTGTGTG |
| | | CCTGCTGAATAACTTCTATCCCAGAGAGGCCAAAGT |
| | | ACAGTGGAAGGTGGATAACGCCCTCCAATCGGGTAA |
| | | CTCCCAGGAGAGTGTCACAGAGCAGGACAGCAAGG |
| | | ACAGCACCTACAGCCTCAGCAGCACCCTGACGCTGA |
| | | GCAAAGCAGACTACGAGAAACACAAAGTCTACGCC |
| | | TGCGAAGTCACCCATCAGGGCCTGAGCTCGCCCGTC |
| | | ACAAAGAGCTTCAACAGGGGAGAGTGTGGAGCCGC |
| | | AGAACAAAAACTCATCTCAGAAGAGGATCTGAATG |
| | | GAGCCGCAGACTACAAGGACGACGACGACAAGGGT |
| | | GCCGCA |
| 105 | Fab light chain | DIQMTQSPSTLSASVGDRVTITCRASQSISSWLAWYQQ |
| | Vk1_5 | KPGKAPKLLIYDASSLESGVPSRFSGSGSGTEFTLTISSL |
| | | QPDDFATYYCQQYNSYSTFGQGTKVEIKRTVAAPSVFI |
| | | FPPSDEQLKSGTASVVCLLNNFYPREAKVQWKVDNAL |
| | | QSGNSQESVTEQDSKDSTYSLSSTLTLSKADYEKHKVY |
| | | ACEVTHQGLSSPVTKSFNRGECGAAEQKLISEEDLNGA |
| | | ADYKDDDDKGAA |
| 106 | nucleotide | CAGGTGCAATTGGTGCAGTCTGGGGCTGAGGTGAAG |
| | sequence of | AAGCCTGGGTCCTCGGTGAAGGTCTCCTGCAAGGCC |
| | Fab heavy chain | TCCGGAGGCACATTCAGCAGCTACGCTATAAGCTGG |
| | VH1_69 | GTGCGACAGGCCCCTGGACAAGGGCTCGAGTGGAT |
| | | GGGAGGGATCATCCCTATCTTTGGTACAGCAAACTA |
| | | CGCACAGAAGTTCCAGGGCAGGGTCACCATTACTGC |
| | | AGACAAATCCACGAGCACAGCCTACATGGAGCTGA |
| | | GCAGCCTGAGATCTGAGGACACCGCCGTGTATTACT |
| | | GTGCGAGACTATCCCCAGGCGGTTACTATGTTATGG |
| | | ATGCCTGGGGCCAAGGGACCACCGTGACCGTCTCCT |
| | | CAGCTAGCACCAAAGGCCCATCGGTCTTCCCCCTGG |
| | | CACCCTCCTCCAAGAGCACCTCTGGGGGCACAGCGG |
| | | CCCTGGGCTGCCTGGTCAAGGACTACTTCCCCGAAC |
| | | CGGTGACGGTGTCGTGGAACTCAGGCGCCCTGACCA |
| | | GCGGCGTGCACACCTTCCCGGCTGTCCTACAGTCCT |
| | | CAGGACTCTACTCCCTCAGCAGCGTGGTGACCGTGC |
| | | CCTCCAGCAGCTTGGGCACCCAGACCTACATCTGCA |
| | | ACGTGAATCACAAGCCCAGCAACACCAAAGTGGAC |
| | | AAGAAAGTTGAGCCCAAATCTTGTGACGCGGCCGCA |
| | | AGCACTAGTGCCCATCACCATCACCATCACGCCGCG |
| | | GCA |
| 107 | Fab heavy chain | QVQLVQSGAEVKKPGSSVKVSCKASGGTFSSYAISWV |
| | VH1_69 | RQAPGQGLEWMGGIIPIFGTANYAQKFQGRVTITADKS |
| | | TSTAYMELSSLRSEDTAVYYCARLSPGGYYVMDAWG |
| | | QGTTVTVSSASTKGPSVFPLAPSSKSTSGGTAALGCLV |
| | | KDYFPEPVTVSWNSGALTSGVHTFPAVLQSSGLYSLSS |
| | | VVTVPSSSLGTQTYICNVNHKPSNTKVDKKVEPKSCD |
| | | AAASTSAHHHHHHAAA |

TABLE 5
Primer sequences used for generation of DP88-4 library

| SEQ | | |
|---|---|---|
| ID NO: | Primer name | Primer sequence 5′-3′ |
| 108 | LMB3 | CAGGAAACAGCTATGACCATGATTAC |
| 109 | Vk1_5_L3r_S | [chemical structure] |
| 110 | Vk1_5_L3r_SY | [chemical structure] |
| 111 | Vk1_5_L3r_SPY | [chemical structure] |
| 112 | RJH31 | ACGTTTGGCCAGGGCACCAAAGTCGAG |
| 113 | RJH32 | TCTCGCACAGTAATACACGGCGGTGTCC |
| 114 | DP88-v4-4 | GGACACCGCCGTGTATTACTGTGCGAGA-1-2-2-3-4- |
| | | GAC-TAC-TGGGGCCAAGGGACCACCGTGACCGTCTCC |
| | | 1: G/D = 20%, E/V/S = 10%, A/P/R/L/T/Y = 5%; |
| | | 2: G/Y/S = 15%, A/D/T/R/P/L/V/N/W/F/I/E = 4.6%; |
| | | 3: G/A/Y = 20%, P/W/S/D/T = 8%; |
| | | 4: F = 46%, L/M = 15%, G/I/Y = 8%. |
| 115 | DP88-v4-6 | GGACACCGCCGTGTATTACTGTGCGAGA-1-2-2-2-2-3-4- |
| | | GAC-TAC-TGGGGCCAAGGGACCACCGTGACCGTCTCC |
| | | 1: G/D = 20%, E/V/S = 10%, A/P/R/L/T/Y = 5%; |
| | | 2: G/Y/S = 15%, A/D/T/R/P/L/V/N/W/F/I/E = 4.6%; |
| | | 3: G/A/Y = 20%, P/W/S/D/T = 8%; |
| | | 4: F = L/M = 15%, G/I/Y = 8%. |
| 116 | DP88-v4-8 | GGACACCGCCGTGTATTACTGTGCGAGA-1-2-2-2-2-2-2- |
| | | 3-4-GAC-TAC- |
| | | TGGGGCCAAGGGACCACCGTGACCGTCTCC |
| | | 1: G/D = 20%, E/V/S = 10%, A/P/R/L/T/Y = 5%; |
| | | 2: G/Y/S = 15%, A/D/T/R/P/L/V/N/W/F/I/E = 4.6%; |
| | | 3: G/A/Y = 20%, P/W/S/D/T = 8%; |
| | | 4: F = 46%, L/M = 15%, G/I/Y = 8%. |
| 117 | fdseqlong | GACGTTAGTAAATGAATTTTCTGTATGAGG |

[0653] Table 6 shows the sequence of generic phage-displayed antibody common light chain library (Vk3_20/VH3_23). Table 7 provides cDNA and amino acid sequences of common light chain library (Vk3_20/VH3_23) germline template and Table 8 shows the Primer sequences used for generation of common light chain library (Vk3_20/VH3_23).

TABLE 6
Sequence of generic phage-displayed antibody common
light chain library (Vk3_20/VH3_23) template used for PCR

| SEQ | | |
|---|---|---|
| ID | | |
| NO: | Description | Sequence |
| 118 | pRJH110 | ATGAAATACCTATTGCCTACGGCAGCCGCTGGATTGTTATTAC |
| | library | TCGCGGCCCAGCCGGCCATGGCCGAAATCGTGTTAACGCAGT |
| | template of | CTCCAGGCACCCTGTCTTTGTCTCCAGGGGAAAGAGCCACCC |
| | common | TCTCTTGCAGGGCCAGTCAGAGTGTTAGCAGCAGCTACTTAG |
| | light chain | CCTGGTACCAGCAGAAACCTGGCCAGGCTCCCAGGCTCCTCA |
| | library | TCTATGGAGCATCCAGCAGGGCCACTGGCATCCCAGACAGGT |
| | Vk3_20/VH3_23; | TCAGTGGCAGTGGATCCGGGACAGACTTCACTCTCACCATCA |
| | complete | GCAGACTGGAGCCTGAAGATTTTGCAGTGTATTACTGTCAGC |
| | Fab coding | AGTATGGTAGCTCACCGCTGACGTTCGGCCAGGGGACCAAAG |
| | region | TGGAAATCAAACGTACGGTGGCTGCACCATCTGTCTTCATCTT |
| | comprising | CCCGCCATCTGATGAGCAGTTGAAATCTGGAACTGCCTCTGTT |
| | PelB leader | GTGTGCCTGCTGAATAACTTCTATCCCAGAGAGGCCAAAGTA |
| | sequence + | CAGTGGAAGGTGGATAACGCCCTCCAATCGGGTAACTCCCAG |
| | Vk3_20 | GAGAGTGTCACAGAGCAGGACAGCAAGGACAGCACCTACAG |
| | kappa V- | CCTCAGCAGCACCCTGACGCTGAGCAAAGCAGACTACGAGA |
| | domain + | AACACAAAGTCTACGCCTGCGAAGTCACCCATCAGGGCCTGA |
| | CL constant | GCTCGCCCGTCACAAAGAGCTTCAACAGGGGAGAGTGTGGA |
| | domain for | GCCGCACATCACCATCACCATCACGGAGCCGCAGACTACAAG |
| | light chain | GACGACGACGACAAGGGTGCCGCATAATAAGGCGCGCCAAT |
| | and PelB + | TCTATTTCAAGGAGACAGTCATATGAAATACCTGCTGCCGAC |
| | VH3_23 V- | CGCTGCTGCTGGTCTGCTGCTCCTCGCTGCCCAGCCGGCGATG |
| | domain + | GCCGAGGTGCAATTGCTGGAGTCTGGGGGAGGCTTGGTACAG |
| | CH1 | CCTGGGGGGTCCCTGAGACTCTCCTGTGCAGCCTCCGGATTC |
| | constant | ACCTTTAGCAGTTATGCCATGAGCTGGGTCCGCCAGGCTCCA |
| | domain for | GGGAAGGGGCTGGAGTGGGTCTCAGCTATTAGTGGTAGTGGT |
| | heavy chain | GGTAGCACATACTACGCAGACTCCGTGAAGGGCCGGTTCACC |
| | including | ATCTCCAGAGACAATTCCAAGAACACGCTGTATCTGCAGATG |
| | tags | AACAGCCTGAGAGCCGAGGACACGGCCGTATATTACTGTGCG |
| | | AAACCGTTTCCGTATTTTGACTACTGGGGCCAAGGAACCCTG |
| | | GTCACCGTCTCGAGTGCTAGCACCAAAGGCCCATCGGTCTTC |
| | | CCCCTGGCACCCTCCTCCAAGAGCACCTCTGGGGGCACAGCG |
| | | GCCCTGGGCTGCCTGGTCAAGGACTACTTCCCCGAACCGGTG |
| | | ACGGTGTCGTGGAACTCAGGCGCCCTGACCAGCGGCGTGCAC |
| | | ACCTTCCCGGCTGTCCTACAGTCCTCAGGACTCTACTCCCTCA |
| | | GCAGCGTGGTGACCGTGCCCTCCAGCAGCTTGGGCACCCAGA |
| | | CCTACATCTGCAACGTGAATCACAAGCCCAGCAACACCAAAG |
| | | TGGACAAGAAAGTTGAGCCCAAATCTTGTGACGCGGCCGCAG |
| | | AACAAAAACTCATCTCAGAAGAGGATCTGAATGCCGCGGCA |

TABLE 7
cDNA and amino acid sequences of common light
chain library (Vk3_20/VH3_23) germline template

| SEQ ID | | |
|---|---|---|
| NO: | Description | Sequence |
| 119 | nucleotide | GAAATCGTGTTAACGCAGTCTCCAGGCACCCTGTCTTT |
| | sequence of | GTCTCCAGGGGAAAGAGCCACCCTCTCTTGCAGGGCCA |
| | Fab light chain | GTCAGAGTGTTAGCAGCAGCTACTTAGCCTGGTACCAG |
| | Vk3_20 | CAGAAACCTGGCCAGGCTCCCAGGCTCCTCATCTATGG |
| | | AGCATCCAGCAGGGCCACTGGCATCCCAGACAGGTTCA |
| | | GTGGCAGTGGATCCGGGACAGACTTCACTCTCACCATC |
| | | AGCAGACTGGAGCCTGAAGATTTTGCAGTGTATTACTG |
| | | TCAGCAGTATGGTAGCTCACCGCTGACGTTCGGCCAGG |
| | | GGACCAAAGTGGAAATCAAACGTACGGTGGCTGCACC |
| | | ATCTGTCTTCATCTTCCCGCCATCTGATGAGCAGTTGAA |
| | | ATCTGGAACTGCCTCTGTTGTGTGCCTGCTGAATAACTT |
| | | CTATCCCAGAGAGGCCAAAGTACAGTGGAAGGTGGAT |
| | | AACGCCCTCCAATCGGGTAACTCCCAGGAGAGTGTCAC |
| | | AGAGCAGGACAGCAAGGACAGCACCTACAGCCTCAGC |
| | | AGCACCCTGACGCTGAGCAAAGCAGACTACGAGAAAC |
| | | ACAAAGTCTACGCCTGCGAAGTCACCCATCAGGGCCTG |
| | | AGCTCGCCCGTCACAAAGAGCTTCAACAGGGGAGAGT |
| | | GTGGAGCCGCACATCACCATCACCATCACGGAGCCGCA |
| | | GACTACAAGGACGACGACGACAAGGGTGCCGCA |
| 120 | Fab light chain | EIVLTQSPGTLSLSPGERATLSCRASQSVSSSYLAWYQQKP |
| | Vk3_20 | GQAPRLLIYGASSRATGIPDRFSGSGSGTDFTLTISRLEPED |
| | | FAVYYCQQYGSSPLTFGQGTKVEIKRTVAAPSVFIFPPSDE |
| | | QLKSGTASVVCLLNNFYPREAKVQWKVDNALQSGNSQE |
| | | SVTEQDSKDSTYSLSSTLTLSKADYEKHKVYACEVTHQG |
| | | LSSPVTKSFNRGECGAAHHHHHHGAADYKDDDDKGAA |
| 121 | nucleotide | GAGGTGCAATTGCTGGAGTCTGGGGGAGGCTTGGTACA |
| | sequence of | GCCTGGGGGGTCCCTGAGACTCTCCTGTGCAGCCTCCG |
| | Fab heavy chain | GATTCACCTTTAGCAGTTATGCCATGAGCTGGGTCCGC |
| | VH3_23 | CAGGCTCCAGGGAAGGGGCTGGAGTGGGTCTCAGCTA |
| | | TTAGTGGTAGTGGTGGTAGCACATACTACGCAGACTCC |
| | | GTGAAGGGCCGGTTCACCATCTCCAGAGACAATTCCAA |
| | | GAACACGCTGTATCTGCAGATGAACAGCCTGAGAGCC |
| | | GAGGACACGGCCGTATATTACTGTGCGAAACCGTTTCC |
| | | GTATTTTGACTACTGGGGCCAAGGAACCCTGGTCACCG |
| | | TCTCGAGTGCTAGCACCAAAGGCCCATCGGTCTTCCCC |
| | | CTGGCACCCTCCTCCAAGAGCACCTCTGGGGGCACAGC |
| | | GGCCCTGGGCTGCCTGGTCAAGGACTACTTCCCCGAAC |
| | | CGGTGACGGTGTCGTGGAACTCAGGCGCCCTGACCAGC |
| | | GGCGTGCACACCTTCCCGGCTGTCCTACAGTCCTCAGG |
| | | ACTCTACTCCCTCAGCAGCGTGGTGACCGTGCCCTCCA |
| | | GCAGCTTGGGCACCCAGACCTACATCTGCAACGTGAAT |
| | | CACAAGCCCAGCAACACCAAAGTGGACAAGAAAGTTG |
| | | AGCCCAAATCTTGTGACGCGGCCGCAGAACAAAAACT |
| | | CATCTCAGAAGAGGATCTGAATGCCGCGGCA |
| 122 | Fab heavy chain | EVQLLESGGGLVQPGGSLRLSCAASGFTFSSYAMSWVRQ |
| | VH3_23 (DP47) | APGKGLEWVSAISGSGGSTYYADSVKGRFTISRDNSKNTL |
| | | YLQMNSLRAEDTAVYYCAKPFPYFDYWGQGTLVTVSSA |
| | | STKGPSVFPLAPSSKSTSGGTAALGCLVKDYFPEPVTVSW |
| | | NSGALTSGVHTFPAVLQSSGLYSLSSVVTVPSSSLGTQTYI |
| | | CNVNHKPSNTKVDKKVEPKSCDAAAEQKLISEEDLNAAA |

TABLE 8
Primer sequences used for generation of DP88-4 library

| SEQ | | |
|---|---|---|
| ID NO: | Primer name | Primer sequence 5′-3′ |
| 123 | MS64 | ACGTTCGGCCAGGGGACCAAAGTGG |
| 124 | DP47CDR3_ba | CGCACAGTAATATACGGCCGTGTCC |
| | (mod.) | |
| 125 | DP47-v4-4 | CGAGGACACGGCCGTATATTACTGTGCG-5-1-2-2-3-4- |
| | | GAC-TAC-TGGGGCCAAGGAACCCTGGTCACCGTCTCG |
| 126 | DP47-v4-6 | CGAGGACACGGCCGTATATTACTGTGCG-5-1-2-2-2-2-3-4- |
| | | GAC-TAC-TGGGGCCAAGGAACCCTGGTCACCGTCTCG |
| 127 | DP47-v4-8 | CGAGGACACGGCCGTATATTACTGTGCG-5-1-2-2-2-2-2-2- |
| | | 3-4-GAC-TAC- |
| | | TGGGGCCAAGGAACCCTGGTCACCGTCTCG |
| 128 | fdseqlong | GACGTTAGTAAATGAATTTTCTGTATGAGG |

1: G/D = 20%, E/V/S = 10%, A/P/R/L/T/Y = 5%;
2: G/Y/S = 15%, A/D/T/R/P/L/V/N/W/F/I/E = 4.6%;
3: G/A/Y = 20%, P/W/S/D/T = 8%;
4: F = 46%, L/M = 15%, G/I/Y = 8%;
5: K = 70%, R = 30%.

[0654] Table 9 shows the sequence of generic phage-displayed lambda-DP47 library (V13_19/VH3_23) template used for PCRs. Table 10 provides cDNA and amino acid sequences of lambda-DP47 library (V13_19/VH3_23) germline template and Table 11 shows the Primer sequences used for generation of lambda-DP47 library (V13_19/VH3_23).

TABLE 9
Sequence of generic phage-displayed lambda-DP47
library (V13_19/VH3_23) template used for PCRs

| SEQ | | |
|---|---|---|
| ID | | |
| NO: | Description | Sequence |
| 129 | pRJH53 | ATGAAATACCTATTGCCTACGGCAGCCGCTGGATTGTTATTAC |
| | library | TCGCGGCCCAGCCGGCCATGGCCTCGTCTGAGCTGACTCAGG |
| | template of | ACCCTGCTGTGTCTGTGGCCTTGGGACAGACAGTCAGGATCA |
| | lambda- | CATGCCAAGGAGACAGCCTCAGAAGTTATTATGCAAGCTGGT |
| | DP47 | ACCAGCAGAAGCCAGGACAGGCCCCTGTACTTGTCATCTATG |
| | library | GTAAAAACAACCGGCCCTCAGGGATCCCAGACCGATTCTCTG |
| | Vl3_19/VH3_23; | GCTCCAGCTCAGGAAACACAGCTTCCTTGACCATCACTGGGG |
| | complete | CTCAGGCGGAAGATGAGGCTGACTATTACTGTAACTCCCGTG |
| | Fab coding | ATAGTAGCGGTAATCATGTGGTATTCGGCGGAGGGACCAAGC |
| | region | TGACCGTCCTAGGACAACCCAAGGCTGCCCCCAGCGTGACCC |
| | comprising | TGTTCCCCCCCAGCAGCGAGGAATTGCAGGCCAACAAGGCCA |
| | PelB leader | CCCTGGTCTGCCTGATCAGCGACTTCTACCCAGGCGCCGTGA |
| | sequence + | CCGTGGCCTGGAAGGCCGACAGCAGCCCCGTGAAGGCCGGC |
| | Vl3_19 | GTGGAGACCACCACCCCCAGCAAGCAGAGCAACAACAAGTA |
| | lambda V- | CGCCGCCAGCAGCTACCTGAGCCTGACCCCCGAGCAGTGGAA |
| | domain + | GAGCCACAGGTCCTACAGCTGCCAGGTGACCCACGAGGGCA |
| | CL constant | GCACCGTGGAGAAAACCGTGGCCCCCACCGAGTGCAGCGGA |
| | domain for | GCCGCAGAACAAAAACTCATCTCAGAAGAGGATCTGAATGG |
| | light chain | AGCCGCAGACTACAAGGACGACGACGACAAGGGTGCCGCAT |
| | and PelB + | AATAAGGCGCGCCAATTCTATTTCAAGGAGACAGTCATATGA |
| | VH3_23 V- | AATACCTGCTGCCGACCGCTGCTGCTGGTCTGCTGCTCCTCGC |
| | domain + | TGCCCAGCCGGCGATGGCCGAGGTGCAATTGCTGGAGTCTGG |
| | CH1 | GGGAGGCTTGGTACAGCCTGGGGGGTCCCTGAGACTCTCCTG |
| | constant | TGCAGCCTCCGGATTCACCTTTAGCAGTTATGCCATGAGCTGG |
| | domain for | GTCCGCCAGGCTCCAGGGAAGGGGCTGGAGTGGGTCTCAGCT |
| | heavy chain | ATTAGTGGTAGTGGTGGTAGCACATACTACGCAGACTCCGTG |
| | including | AAGGGCCGGTTCACCATCTCCAGAGACAATTCCAAGAACACG |
| | tags | CTGTATCTGCAGATGAACAGCCTGAGAGCCGAGGACACGGCC |
| | | GTATATTACTGTGCGAAACCGTTTCCGTATTTTGACTACTGGG |
| | | GCCAAGGAACCCTGGTCACCGTCTCGAGTGCTAGCACCAAAG |
| | | GCCCATCGGTCTTCCCCCTGGCACCCTCCTCCAAGAGCACCTC |
| | | TGGGGGCACAGCGGCCCTGGGCTGCCTGGTCAAGGACTACTT |
| | | CCCCGAACCGGTGACGGTGTCGTGGAACTCAGGCGCCCTGAC |
| | | CAGCGGCGTGCACACCTTCCCGGCTGTCCTACAGTCCTCAGG |
| | | ACTCTACTCCCTCAGCAGCGTGGTGACCGTGCCCTCCAGCAG |
| | | CTTGGGCACCCAGACCTACATCTGCAACGTGAATCACAAGCC |
| | | CAGCAACACCAAAGTGGACAAGAAAGTTGAGCCCAAATCTT |
| | | GTGACGCGGCCGCAAGCACTAGTGCCCATCACCATCACCATC |
| | | ACGCCGCGGCA |

TABLE 10
cDNA and amino acid sequences of lambda-DP47
library (Vl3_19/VH3_23) germline template

| SEQ ID | | |
|---|---|---|
| NO: | Description | Sequence |
| 130 | nucleotide | TCGTCTGAGCTGACTCAGGACCCTGCTGTGTCTGTGGC |
| | sequence of | CTTGGGACAGACAGTCAGGATCACATGCCAAGGAGAC |
| | Fab light chain | AGCCTCAGAAGTTATTATGCAAGCTGGTACCAGCAGAA |
| | Vl3_19 | GCCAGGACAGGCCCCTGTACTTGTCATCTATGGTAAAA |
| | | ACAACCGGCCCTCAGGGATCCCAGACCGATTCTCTGGC |
| | | TCCAGCTCAGGAAACACAGCTTCCTTGACCATCACTGG |
| | | GGCTCAGGCGGAAGATGAGGCTGACTATTACTGTAACT |
| | | CCCGTGATAGTAGCGGTAATCATGTGGTATTCGGCGGA |
| | | GGGACCAAGCTGACCGTCCTAGGACAACCCAAGGCTG |
| | | CCCCCAGCGTGACCCTGTTCCCCCCCAGCAGCGAGGAA |
| | | TTGCAGGCCAACAAGGCCACCCTGGTCTGCCTGATCAG |
| | | CGACTTCTACCCAGGCGCCGTGACCGTGGCCTGGAAGG |
| | | CCGACAGCAGCCCCGTGAAGGCCGGCGTGGAGACCAC |
| | | CACCCCCAGCAAGCAGAGCAACAACAAGTACGCCGCC |
| | | AGCAGCTACCTGAGCCTGACCCCCGAGCAGTGGAAGA |
| | | GCCACAGGTCCTACAGCTGCCAGGTGACCCACGAGGG |
| | | CAGCACCGTGGAGAAAACCGTGGCCCCCACCGAGTGC |
| | | AGCGGAGCCGCAGAACAAAAACTCATCTCAGAAGAGG |
| | | ATCTGAATGGAGCCGCAGACTACAAGGACGACGACGA |
| | | CAAGGGTGCCGCA |
| 131 | Fab light chain | SSELTQDPAVSVALGQTVRITCQGDSLRSYYASWYQQKP |
| | Vl3_19 | GQAPVLVIYGKNNRPSGIPDRFSGSSSGNTASLTITGAQAE |
| | | DEADYYCNSRDSSGNHVVFGGGTKLTVLGQPKAAPSVTL |
| | | FPPSSEELQANKATLVCLISDFYPGAVTVAWKADSSPVKA |
| | | GVETTTPSKQSNNKYAASSYLSLTPEQWKSHRSYSCQVT |
| | | HEGSTVEKTVAPTECSGAAEQKLISEEDLNGAADYKDDD |
| | | DKGAA |
| 121 | nucleotide | see Table 7 |
| | sequence of | |
| | Fab heavy chain | |
| | VH3_23 | |
| 122 | Fab heavy chain | see Table 7 |
| | VH3_23 (DP47) | |

TABLE 11
Primer sequences used for generation of lambda-DP47 library (V13_19/VH3_23)

| SEQ | | |
|---|---|---|
| ID NO: | Primer name | Primer sequence 5′-3′ |
| 132 | LMB3 | CAGGAAACAGCTATGACCATGATTAC |
| 133 | Vl_3_19_L3r_V | [chemical structure] |
| 134 | Vl_3_19_L3r_HV | [chemical structure] |
| 135 | Vl_3_19_L3r_HL V | [chemical structure] |
| 136 | RJH80 | TTCGGCGGAGGGACCAAGCTGACCGTCC |

Additional primers used for construction of the lambda-DP47 library, i.e. DP47CDR3_ba (mod.), DP47-v4-4, DP47-v4-6, DP47-v4-8 and fdseqlong, are identical to the primers used for the construction of the common light chain library (Vk3_20/VH3_23) and have already been listed in Table 8.

[0655] Clones 8H9, 20B7, 49B4, 1G4, CLC-563, CLC-564 and 17A9 were identified as human Ox40-specific binders through the procedure described above. The cDNA sequences of their variable regions are shown in Table 12 below, the corresponding amino acid sequences can be found in Table C.

TABLE 12
Variable region base pair sequences for phage-derived
anti-Ox40 antibodies. Underlined are the
complementary determining regions (CDRs).

| | SEQ ID | |
|---|---|---|
| Clone | NO: | Sequence |
| 8H9 | 137 (VL) | TCGTCTGAGCTGACTCAGGACCCTGCTGTGTCTGTGGCCTTGGGA |
| | | CAGACAGTCAGGATCACATGCCAAGGAGACAGCCTCAGAAGTT |
| | | ATTATGCAAGCTGGTACCAGCAGAAGCCAGGACAGGCCCCTGTA |
| | | CTTGTCATCTATGGTAAAAACAACCGGCCCTCAGGGATCCCAGA |
| | | CCGATTCTCTGGCTCCAGCTCAGGAAACACAGCTTCCTTGACCAT |
| | | CACTGGGGCTCAGGCGGAAGATGAGGCTGACTATTACTGTAACT |
| | | CCCGTGTTATGCCTCATAATCGCGTATTCGGCGGAGGGACCAAG |
| | | CTGACCGTC |
| | 138 (VH) | GAGGTGCAATTGTTGGAGTCTGGGGGAGGCTTGGTACAGCCTGG |
| | | GGGGTCCCTGAGACTCTCCTGTGCAGCCTCCGGATTCACCTTTAG |
| | | CAGTTATGCCATGAGCTGGGTCCGCCAGGCTCCAGGGAAGGGGC |
| | | TGGAGTGGGTCTCAGCTATTAGTGGTAGTGGTGGTAGCACATAC |
| | | TACGCAGACTCCGTGAAGGGCCGGTTCACCATCTCCAGAGACAA |
| | | TTCCAAGAACACGCTGTATCTGCAGATGAACAGCCTGAGAGCCG |
| | | AGGACACGGCCGTATATTACTGTGCGCGTGTTTTCTACCGTGGTG |
| | | GTGTTTCTATGGACTACTGGGGCCAAGGAACCCTGGTCACCGTC |
| | | TCGAGT |
| 49B4 | 139 (VL) | GACATCCAGATGACCCAGTCTCCTTCCACCCTGTCTGCATCTGTA |
| | | GGAGACCGTGTCACCATCACTTGCCGTGCCAGTCAGAGTATTAG |
| | | TAGCTGGTTGGCCTGGTATCAGCAGAAACCAGGGAAAGCCCCTA |
| | | AGCTCCTGATCTATGATGCCTCCAGTTTGGAAAGTGGGGTCCCAT |
| | | CACGTTTCAGCGGCAGTGGATCCGGGACAGAATTCACTCTCACC |
| | | ATCAGCAGCTTGCAGCCTGATGATTTTGCAACTTATTACTGCCAA |
| | | CAGTATAGTTCGCAGCCGTATACGTTTGGCCAGGGCACCAAAGT |
| | | CGAGATCAAG |
| | 140 (VH) | CAGGTGCAATTGGTGCAGTCTGGGGCTGAGGTGAAGAAGCCTGG |
| | | GTCCTCGGTGAAGGTCTCCTGCAAGGCCTCCGGAGGCACATTCA |
| | | GCAGCTACGCTATAAGCTGGGTGCGACAGGCCCCTGGACAAGGG |
| | | CTCGAGTGGATGGGAGGGATCATCCCTATCTTTGGTACAGCAAA |
| | | CTACGCACAGAAGTTCCAGGGCAGGGTCACCATTACTGCAGACA |
| | | AATCCACGAGCACAGCCTACATGGAGCTGAGCAGCCTGAGATCT |
| | | GAGGACACCGCCGTGTATTACTGTGCGAGAGAATACTACCGTGG |
| | | TCCGTACGACTACTGGGGCCAAGGGACCACCGTGACCGTCTCCT |
| | | CA |
| 1G4 | 141 (VL) | GACATCCAGATGACCCAGTCTCCTTCCACCCTGTCTGCATCTGTA |
| | | GGAGACCGTGTCACCATCACTTGCCGTGCCAGTCAGAGTATTAG |
| | | TAGCTGGTTGGCCTGGTATCAGCAGAAACCAGGGAAAGCCCCTA |
| | | AGCTCCTGATCTATGATGCCTCCAGTTTGGAAAGTGGGGTCCCAT |
| | | CACGTTTCAGCGGCAGTGGATCCGGGACAGAATTCACTCTCACC |
| | | ATCAGCAGCTTGCAGCCTGATGATTTTGCAACTTATTACTGCCAA |
| | | CAGTATATTTCGTATTCCATGTTGACGTTTGGCCAGGGCACCAAA |
| | | GTCGAGATCAAG |
| | 142 (VH) | CAGGTGCAATTGGTGCAGTCTGGGGCTGAGGTGAAGAAGCCTGG |
| | | GTCCTCGGTGAAGGTCTCCTGCAAGGCCTCCGGAGGCACATTCA |
| | | GCAGCTACGCTATAAGCTGGGTGCGACAGGCCCCTGGACAAGGG |
| | | CTCGAGTGGATGGGAGGGATCATCCCTATCTTTGGTACAGCAAA |
| | | CTACGCACAGAAGTTCCAGGGCAGGGTCACCATTACTGCAGACA |
| | | AATCCACGAGCACAGCCTACATGGAGCTGAGCAGCCTGAGATCT |
| | | GAGGACACCGCCGTGTATTACTGTGCGAGAGAATACGGTTCTAT |
| | | GGACTACTGGGGCCAAGGGACCACCGTGACCGTCTCCTCA |
| 20B7 | 143 (VL) | GACATCCAGATGACCCAGTCTCCTTCCACCCTGTCTGCATCTGTA |
| | | GGAGACCGTGTCACCATCACTTGCCGTGCCAGTCAGAGTATTAG |
| | | TAGCTGGTTGGCCTGGTATCAGCAGAAACCAGGGAAAGCCCCTA |
| | | AGCTCCTGATCTATGATGCCTCCAGTTTGGAAAGTGGGGTCCCAT |
| | | CACGTTTCAGCGGCAGTGGATCCGGGACAGAATTCACTCTCACC |
| | | ATCAGCAGCTTGCAGCCTGATGATTTTGCAACTTATTACTGCCAA |
| | | CAGTATCAGGCTTTTTCGCTTACGTTTGGCCAGGGCACCAAAGTC |
| | | GAGATCAAG |
| | 144 (VH) | CAGGTGCAATTGGTGCAGTCTGGGGCTGAGGTGAAGAAGCCTGG |
| | | GTCCTCGGTGAAGGTCTCCTGCAAGGCCTCCGGAGGCACATTCA |
| | | GCAGCTACGCTATAAGCTGGGTGCGACAGGCCCCTGGACAAGGG |
| | | CTCGAGTGGATGGGAGGGATCATCCCTATCTTTGGTACAGCAAA |
| | | CTACGCACAGAAGTTCCAGGGCAGGGTCACCATTACTGCAGACA |
| | | AATCCACGAGCACAGCCTACATGGAGCTGAGCAGCCTGAGATCT |
| | | GAGGACACCGCCGTGTATTACTGTGCGAGAGTTAACTACCCGTA |
| | | CTCTTACTGGGGTGACTTCGACTACTGGGGCCAAGGGACCACCG |
| | | TGACCGTCTCCTCA |
| CLC- | 145 (VL) | GAGATCGTGCTGACCCAGAGCCCCGGCACACTCTCCCTGTCTCCT |
| 563 | | GGGGAAAGGGCCACCCTTTCATGCAGAGCCAGCCAGTCCGTCTC |
| | | TAGTAGCTACCTGGCATGGTATCAGCAGAAGCCAGGACAAGCCC |
| | | CCCGCCTCCTGATTTACGGCGCTTCCTCTCGGGCAACTGGTATCC |
| | | CTGACAGGTTCTCAGGGAGCGGAAGCGGAACAGATTTTACCTTG |
| | | ACTATTTCTAGACTGGAGCCAGAGGACTTCGCCGTGTATTACTGT |
| | | CAGCAGTACGGTAGTAGCCCCCTCACCTTTGGCCAGGGGACAAA |
| | | AGTCGAAATCAAG |
| | 146 (VH) | GAGGTGCAATTGTTGGAGTCTGGGGGAGGCTTGGTACAGCCTGG |
| | | GGGGTCCCTGAGACTCTCCTGTGCAGCCTCCGGATTCACCTTTAG |
| | | CAGTTATGCCATGAGCTGGGTCCGCCAGGCTCCAGGGAAGGGGC |
| | | TGGAGTGGGTCTCAGCTATTAGTGGTAGTGGTGGTAGCACATAC |
| | | TACGCAGACTCCGTGAAGGGCCGGTTCACCATCTCCAGAGACAA |
| | | TTCCAAGAACACGCTGTATCTGCAGATGAACAGCCTGAGAGCCG |
| | | AGGACACGGCCGTATATTACTGTGCGCTTGACGTTGGTGCTTTCG |
| | | ACTACTGGGGCCAAGGAGCCCTGGTCACCGTCTCGAGT |
| CLC- | 147 (VL) | GAGATCGTGCTGACCCAGAGCCCCGGCACACTCTCCCTGTCTCCT |
| 564 | | GGGGAAAGGGCCACCCTTTCATGCAGAGCCAGCCAGTCCGTCTC |
| | | TAGTAGCTACCTGGCATGGTATCAGCAGAAGCCAGGACAAGCCC |
| | | CCCGCCTCCTGATTTACGGCGCTTCCTCTCGGGCAACTGGTATCC |
| | | CTGACAGGTTCTCAGGGAGCGGAAGCGGAACAGATTTTACCTTG |
| | | ACTATTTCTAGACTGGAGCCAGAGGACTTCGCCGTGTATTACTGT |
| | | CAGCAGTACGGTAGTAGCCCCCTCACCTTTGGCCAGGGGACAAA |
| | | AGTCGAAATCAAG |
| | 148 (VH) | GAGGTGCAATTGTTGGAGTCTGGGGGAGGCTTGGTACAGCCTGG |
| | | GGGGTCCCTGAGACTCTCCTGTGCAGCCTCCGGATTCACCTTTAG |
| | | CAGTTATGCCATGAGCTGGGTCCGCCAGGCTCCAGGGAAGGGGC |
| | | TGGAGTGGGTCTCAGCTATTAGTGGTAGTGGTGGTAGCACATAC |
| | | TACGCAGACTCCGTGAAGGGCCGGTTCACCATCTCCAGAGACAA |
| | | TTCCAAGAACACGCTGTATCTGCAGATGAACAGCCTGAGAGCCG |
| | | AGGACACGGCCGTATATTACTGTGCGTTCGACGTTGGTCCGTTCG |
| | | ACTACTGGGGCCAAGGAACCCTGGTCACCGTCTCGAGT |
| 17A9 | 149 (VL) | TCGTCTGAGCTGACTCAGGACCCTGCTGTGTCTGTGGCCTTGGGA |
| | | CAGACAGTCAGGATCACATGCCAAGGAGACAGCCTCAGAAGTT |
| | | ATTATGCAAGCTGGTACCAGCAGAAGCCAGGACAGGCCCCTGTA |
| | | CTTGTCATCTATGGTAAAAACAACCGGCCCTCAGGGATCCCAGA |
| | | CCGATTCTCTGGCTCCAGCTCAGGAAACACAGCTTCCTTGACCAT |
| | | CACTGGGGCTCAGGCGGAAGATGAGGCTGACTATTACTGTAACT |
| | | CCCGTGTTATGCCTCATAATCGCGTATTCGGCGGAGGGACCAAG |
| | | CTGACCGTC |
| | 150 (VH) | GAGGTGCAATTGTTGGAGTCTGGGGGAGGCTTGGTACAGCCTGG |
| | | GGGGTCCCTGAGACTCTCCTGTGCAGCCTCCGGATTCACCTTTAG |
| | | CAGTTATGCCATGAGCTGGGTCCGCCAGGCTCCAGGGAAGGGGC |
| | | TGGAGTGGGTCTCAGCTATTAGTGGTAGTGGTGGTAGCACATAC |
| | | TACGCAGACTCCGTGAAGGGCCGGTTCACCATCTCCAGAGACAA |
| | | TTCCAAGAACACGCTGTATCTGCAGATGAACAGCCTGAGAGCCG |
| | | AGGACACGGCCGTATATTACTGTGCGCGTGTTTTCTACCGTGGTG |
| | | GTGTTTCTATGGACTACTGGGGCCAAGGAACCCTGGTCACCGTC |
| | | TCGAGT |

### 1.3 Preparation, Purification and Characterization of Anti-Ox40 IgG1 P329G LALA Antibodies

[0656] The variable regions of heavy and light chain DNA sequences of selected anti-Ox40 binders were subcloned in frame with either the constant heavy chain or the constant light chain of human IgG1. The Pro329Gly, Leu234Ala and Leu235Ala mutations have been introduced in the constant region of the knob and hole heavy chains to abrogate binding to Fc gamma receptors according to the method described in International Patent Appl. Publ. No. WO 2012/130831 A1.

[0657] The cDNA and amino acid sequences of the anti-Ox40 clones are shown in Table 13. All anti-Ox40-Fc-fusion encoding sequences were cloned into a plasmid vector, which drives expression of the insert from an MPSV promoter and contains a synthetic polyA signal sequence located at the 3′ end of the CDS. In addition, the vector contains an EBV OriP sequence for episomal maintenance of the plasmid

TABLE 13
Sequences of anti-Ox40 clones in P329GLALA human IgG1 format

| Clone | SEQ ID No. | Sequence |
|---|---|---|
| 8B9 | 151 | GACATCCAGATGACCCAGTCTCCTTCCACCCTGTCTGCATCT |
| | (nucleotide | GTAGGAGACCGTGTCACCATCACTTGCCGTGCCAGTCAGAG |
| | sequence light | TATTAGTAGCTGGTTGGCCTGGTATCAGCAGAAACCAGGGA |
| | chain) | AAGCCCCTAAGCTCCTGATCTATGATGCCTCCAGTTTGGAA |
| | | AGTGGGGTCCCATCACGTTTCAGCGGCAGTGGATCCGGGAC |
| | | AGAATTCACTCTCACCATCAGCAGCTTGCAGCCTGATGATTT |
| | | TGCAACTTATTACTGCCAACAGTATTTGACGTATTCGCGGTT |
| | | TACGTTTGGCCAGGGCACCAAAGTCGAGATCAAGGTACGGT |
| | | GGCTGCACCATCTGTCTTCATCTTCCCGCCATCTGATGAGCA |
| | | GTTGAAATCTGGAACTGCCTCTGTTGTGTGCCTGCTGAATAA |
| | | CTTCTATCCCAGAGAGGCCAAAGTACAGTGGAAGGTGGATA |
| | | ACGCCCTCCAATCGGGTAACTCCCAGGAGAGTGTCACAGAG |
| | | CAGGACAGCAAGGACAGCACCTACAGCCTCAGCAGCACCCT |
| | | GACGCTGAGCAAAGCAGACTACGAGAAACACAAAGTCTAC |
| | | GCCTGCGAAGTCACCCATCAGGGCCTGAGCTCGCCCGTCAC |
| | | AAAGAGCTTCAACAGGGGAGAGTGT |
| | 152 | CAGGTGCAATTGGTGCAGTCTGGGGCTGAGGTGAAGAAGCC |
| | (nucleotide | TGGGTCCTCGGTGAAGGTCTCCTGCAAGGCCTCCGGAGGCA |
| | sequence heavy | CATTCAGCAGCTACGCTATAAGCTGGGTGCGACAGGCCCCT |
| | chain) | GGACAAGGGCTCGAGTGGATGGGAGGGATCATCCCTATCTT |
| | | TGGTACAGCAAACTACGCACAGAAGTTCCAGGGCAGGGTCA |
| | | CCATTACTGCAGACAAATCCACGAGCACAGCCTACATGGAG |
| | | CTGAGCAGCCTGAGATCTGAGGACACCGCCGTGTATTACTG |
| | | TGCGAGAGAATACGGTTGGATGGACTACTGGGGCCAAGGG |
| | | ACCACCGTGACCGTCTCCTCAGCTAGCACCAAGGGCCCATC |
| | | GGTCTTCCCCCTGGCACCCTCCTCCAAGAGCACCTCTGGGG |
| | | GCACAGCGGCCCTGGGCTGCCTGGTCAAGGACTACTTCCCC |
| | | GAACCGGTGACGGTGTCGTGGAACTCAGGCGCCCTGACCAG |
| | | CGGCGTGCACACCTTCCCGGCTGTCCTACAGTCCTCAGGACT |
| | | CTACTCCCTCAGCAGCGTGGTGACCGTGCCCTCCAGCAGCTT |
| | | GGGCACCCAGACCTACATCTGCAACGTGAATCACAAGCCCA |
| | | GCAACACCAAGGTGGACAAGAAAGTTGAGCCCAAATCTTGT |
| | | GACAAAACTCACACATGCCCACCGTGCCCAGCACCTGAAGC |
| | | TGCAGGGGGACCGTCAGTCTTCCTCTTCCCCCCAAAACCCA |
| | | AGGACACCCTCATGATCTCCCGGACCCCTGAGGTCACATGC |
| | | GTGGTGGTGGACGTGAGCCACGAAGACCCTGAGGTCAAGTT |
| | | CAACTGGTACGTGGACGGCGTGGAGGTGCATAATGCCAAGA |
| | | CAAAGCCGCGGGAGGAGCAGTACAACAGCACGTACCGTGT |
| | | GGTCAGCGTCCTCACCGTCCTGCACCAGGACTGGCTGAATG |
| | | GCAAGGAGTACAAGTGCAAGGTCTCCAACAAAGCCCTCGGC |
| | | GCCCCCATCGAGAAAACCATCTCCAAAGCCAAAGGGCAGCC |
| | | CCGAGAACCACAGGTGTACACCCTGCCCCCATCCCGGGATG |
| | | AGCTGACCAAGAACCAGGTCAGCCTGACCTGCCTGGTCAAA |
| | | GGCTTCTATCCCAGCGACATCGCCGTGGAGTGGGAGAGCAA |
| | | TGGGCAGCCGGAGAACAACTACAAGACCACGCCTCCCGTGC |
| | | TGGACTCCGACGGCTCCTTCTTCCTCTACAGCAAGCTCACCG |
| | | TGGACAAGAGCAGGTGGCAGCAGGGGAACGTCTTCTCATGC |
| | | TCCGTGATGCATGAGGCTCTGCACAACCACTACACGCAGAA |
| | | GAGCCTCTCCCTGTCTCCGGGTAAA |
| | 153 | DIQMTQSPSTLSASVGDRVTITCRASQSISSWLAWYQQKPGKA |
| | (Light chain) | PKLLIYDASSLESGVPSRFSGSGSGTEFTLTISSLQPDDFATYYC |
| | | QQYLTYSRFTFGQGTKVEIKRTVAAPSVFIFPPSDEQLKSGTAS |
| | | VVCLLNNFYPREAKVQWKVDNALQSGNSQESVTEQDSKDSTY |
| | | SLSSTLTLSKADYEKHKVYACEVTHQGLSSPVTKSFNRGEC |
| | 154 | QVQLVQSGAEVKKPGSSVKVSCKASGGTFSSYAISWVRQAPG |
| | (Heavy chain) | QGLEWMGGIIPIFGTANYAQKFQGRVTITADKSTSTAYMELSS |
| | | LRSEDTAVYYCAREYGWMDYWGQGTTVTVSSASTKGPSVFP |
| | | LAPSSKSTSGGTAALGCLVKDYFPEPVTVSWNSGALTSGVHTF |
| | | PAVLQSSGLYSLSSVVTVPSSSLGTQTYICNVNHKPSNTKVDK |
| | | KVEPKSCDKTHTCPPCPAPEAAGGPSVFLFPPKPKDTLMISRTP |
| | | EVTCVVVDVSHEDPEVKFNWYVDGVEVHNAKTKPREEQYNS |
| | | TYRVVSVLTVLHQDWLNGKEYKCKVSNKALGAPIEKTISKAK |
| | | GQPREPQVYTLPPSRDELTKNQVSLTCLVKGFYPSDIAVEWES |
| | | NGQPENNYKTTPPVLDSDGSFFLYSKLTVDKSRWQQGNVFSCS |
| | | VMHEALHNHYTQKSLSLSPGK |
| 49B4 | 155 | GACATCCAGATGACCCAGTCTCCTTCCACCCTGTCTGCATCT |
| | (nucleotide | GTAGGAGACCGTGTCACCATCACTTGCCGTGCCAGTCAGAG |
| | sequence light | TATTAGTAGCTGGTTGGCCTGGTATCAGCAGAAACCAGGGA |
| | chain) | AAGCCCCTAAGCTCCTGATCTATGATGCCTCCAGTTTGGAA |
| | | AGTGGGGTCCCATCACGTTTCAGCGGCAGTGGATCCGGGAC |
| | | AGAATTCACTCTCACCATCAGCAGCTTGCAGCCTGATGATTT |
| | | TGCAACTTATTACTGCCAACAGTATAGTTCGCAGCCGTATAC |
| | | GTTTGGCCAGGGCACCAAAGTCGAGATCAAGCGTACGGTGG |
| | | CTGCACCATCTGTCTTCATCTTCCCGCCATCTGATGAGCAGT |
| | | TGAAATCTGGAACTGCCTCTGTTGTGTGCCTGCTGAATAACT |
| | | TCTATCCCAGAGAGGCCAAAGTACAGTGGAAGGTGGATAAC |
| | | GCCCTCCAATCGGGTAACTCCCAGGAGAGTGTCACAGAGCA |
| | | GGACAGCAAGGACAGCACCTACAGCCTCAGCAGCACCCTG |
| | | ACGCTGAGCAAAGCAGACTACGAGAAACACAAAGTCTACG |
| | | CCTGCGAAGTCACCCATCAGGGCCTGAGCTCGCCCGTCACA |
| | | AAGAGCTTCAACAGGGGAGAGTGT |
| | 156 | CAGGTGCAATTGGTGCAGTCTGGGGCTGAGGTGAAGAAGCC |
| | (nucleotide | TGGGTCCTCGGTGAAGGTCTCCTGCAAGGCCTCCGGAGGCA |
| | sequence heavy | CATTCAGCAGCTACGCTATAAGCTGGGTGCGACAGGCCCCT |
| | chain) | GGACAAGGGCTCGAGTGGATGGGAGGGATCATCCCTATCTT |
| | | TGGTACAGCAAACTACGCACAGAAGTTCCAGGGCAGGGTCA |
| | | CCATTACTGCAGACAAATCCACGAGCACAGCCTACATGGAG |
| | | CTGAGCAGCCTGAGATCTGAGGACACCGCCGTGTATTACTG |
| | | TGCGAGAGAATACTACCGTGGTCCGTACGACTACTGGGGCC |
| | | AAGGGACCACCGTGACCGTCTCCTCAGCTAGCACCAAGGGC |
| | | CCATCGGTCTTCCCCCTGGCACCCTCCTCCAAGAGCACCTCT |
| | | GGGGGCACAGCGGCCCTGGGCTGCCTGGTCAAGGACTACTT |
| | | CCCCGAACCGGTGACGGTGTCGTGGAACTCAGGCGCCCTGA |
| | | CCAGCGGCGTGCACACCTTCCCGGCTGTCCTACAGTCCTCA |
| | | GGACTCTACTCCCTCAGCAGCGTGGTGACCGTGCCCTCCAG |
| | | CAGCTTGGGCACCCAGACCTACATCTGCAACGTGAATCACA |
| | | AGCCCAGCAACACCAAGGTGGACAAGAAAGTTGAGCCCAA |
| | | ATCTTGTGACAAAACTCACACATGCCCACCGTGCCCAGCAC |
| | | CTGAAGCTGCAGGGGGACCGTCAGTCTTCCTCTTCCCCCCA |
| | | AAACCCAAGGACACCCTCATGATCTCCCGGACCCCTGAGGT |
| | | CACATGCGTGGTGGTGGACGTGAGCCACGAAGACCCTGAGG |
| | | TCAAGTTCAACTGGTACGTGGACGGCGTGGAGGTGCATAAT |
| | | GCCAAGACAAAGCCGCGGGAGGAGCAGTACAACAGCACGT |
| | | ACCGTGTGGTCAGCGTCCTCACCGTCCTGCACCAGGACTGG |
| | | CTGAATGGCAAGGAGTACAAGTGCAAGGTCTCCAACAAAG |
| | | CCCTCGGCGCCCCCATCGAGAAAACCATCTCCAAAGCCAAA |
| | | GGGCAGCCCCGAGAACCACAGGTGTACACCCTGCCCCCATC |
| | | CCGGGATGAGCTGACCAAGAACCAGGTCAGCCTGACCTGCC |
| | | TGGTCAAAGGCTTCTATCCCAGCGACATCGCCGTGGAGTGG |
| | | GAGAGCAATGGGCAGCCGGAGAACAACTACAAGACCACGC |
| | | CTCCCGTGCTGGACTCCGACGGCTCCTTCTTCCTCTACAGCA |
| | | AGCTCACCGTGGACAAGAGCAGGTGGCAGCAGGGGAACGT |
| | | CTTCTCATGCTCCGTGATGCATGAGGCTCTGCACAACCACTA |
| | | CACGCAGAAGAGCCTCTCCCTGTCTCCGGGTAAA |
| | 157 | DIQMTQSPSTLSASVGDRVTITCRASQSISSWLAWYQQKPGKA |
| | (Light chain) | PKLLIYDASSLESGVPSRFSGSGSGTEFTLTISSLQPDDFATYYC |
| | | QQYSSQPYTFGQGTKVEIKRTVAAPSVFIFPPSDEQLKSGTASV |
| | | VCLLNNFYPREAKVQWKVDNALQSGNSQESVTEQDSKDSTYS |
| | | LSSTLTLSKADYEKHKVYACEVTHQGLSSPVTKSFNRGEC |
| | 158 | QVQLVQSGAEVKKPGSSVKVSCKASGGTFSSYAISWVRQAPG |
| | (Heavy chain) | QGLEWMGGIIPIFGTANYAQKFQGRVTITADKSTSTAYMELSS |
| | | LRSEDTAVYYCAREYYRGPYDYWGQGTTVTVSSASTKGPSVF |
| | | PLAPSSKSTSGGTAALGCLVKDYFPEPVTVSWNSGALTSGVHT |
| | | FPAVLQSSGLYSLSSWTVPSSSLGTQTYICNVNHKPSNTKVDK |
| | | KVEPKSCDKTHTCPPCPAPEAAGGPSVFLFPPKPKDTLMISRTP |
| | | EVTCVVVDVSHEDPEVKFNWYVDGVEVHNAKTKPREEQYNS |
| | | TYRVVSVLTVLHQDWLNGKEYKCKVSNKALGAPIEKTISKAK |
| | | GQPREPQVYTLPPSRDELTKNQVSLTCLVKGFYPSDIAVEWES |
| | | NGQPENNYKTTPPVLDSDGSFFLYSKLTVDKSRWQQGNVFSCS |
| | | VMHEALHNHYTQKSLSLSPGK |
| 1G4 | 159 | GACATCCAGATGACCCAGTCTCCTTCCACCCTGTCTGCATCT |
| | (nucleotide | GTAGGAGACCGTGTCACCATCACTTGCCGTGCCAGTCAGAG |
| | sequence light | TATTAGTAGCTGGTTGGCCTGGTATCAGCAGAAACCAGGGA |
| | chain) | AAGCCCCTAAGCTCCTGATCTATGATGCCTCCAGTTTGGAA |
| | | AGTGGGGTCCCATCACGTTTCAGCGGCAGTGGATCCGGGAC |
| | | AGAATTCACTCTCACCATCAGCAGCTTGCAGCCTGATGATTT |
| | | TGCAACTTATTACTGCCAACAGTATATTTCGTATTCCATGTT |
| | | GACGTTTGGCCAGGGCACCAAAGTCGAGATCAAGCGTACGG |
| | | TGGCTGCACCATCTGTCTTCATCTTCCCGCCATCTGATGAGC |
| | | AGTTGAAATCTGGAACTGCCTCTGTTGTGTGCCTGCTGAATA |
| | | ACTTCTATCCCAGAGAGGCCAAAGTACAGTGGAAGGTGGAT |
| | | AACGCCCTCCAATCGGGTAACTCCCAGGAGAGTGTCACAGA |
| | | GCAGGACAGCAAGGACAGCACCTACAGCCTCAGCAGCACC |
| | | CTGACGCTGAGCAAAGCAGACTACGAGAAACACAAAGTCT |
| | | ACGCCTGCGAAGTCACCCATCAGGGCCTGAGCTCGCCCGTC |
| | | ACAAAGAGCTTCAACAGGGGAGAGTGT |
| | 160 | CAGGTGCAATTGGTGCAGTCTGGGGCTGAGGTGAAGAAGCC |
| | (nucleotide | TGGGTCCTCGGTGAAGGTCTCCTGCAAGGCCTCCGGAGGCA |
| | sequence heavy | CATTCAGCAGCTACGCTATAAGCTGGGTGCGACAGGCCCCT |
| | chain) | GGACAAGGGCTCGAGTGGATGGGAGGGATCATCCCTATCTT |
| | | TGGTACAGCAAACTACGCACAGAAGTTCCAGGGCAGGGTCA |
| | | CCATTACTGCAGACAAATCCACGAGCACAGCCTACATGGAG |
| | | CTGAGCAGCCTGAGATCTGAGGACACCGCCGTGTATTACTG |
| | | TGCGAGAGAATACGGTTCTATGGACTACTGGGGCCAAGGGA |
| | | CCACCGTGACCGTCTCCTCAGCTAGCACCAAGGGCCCATCG |
| | | GTCTTCCCCCTGGCACCCTCCTCCAAGAGCACCTCTGGGGGC |
| | | ACAGCGGCCCTGGGCTGCCTGGTCAAGGACTACTTCCCCGA |
| | | ACCGGTGACGGTGTCGTGGAACTCAGGCGCCCTGACCAGCG |
| | | GCGTGCACACCTTCCCGGCTGTCCTACAGTCCTCAGGACTCT |
| | | ACTCCCTCAGCAGCGTGGTGACCGTGCCCTCCAGCAGCTTG |
| | | GGCACCCAGACCTACATCTGCAACGTGAATCACAAGCCCAG |
| | | CAACACCAAGGTGGACAAGAAAGTTGAGCCCAAATCTTGTG |
| | | ACAAAACTCACACATGCCCACCGTGCCCAGCACCTGAAGCT |
| | | GCAGGGGGACCGTCAGTCTTCCTCTTCCCCCCAAAACCCAA |
| | | GGACACCCTCATGATCTCCCGGACCCCTGAGGTCACATGCG |
| | | TGGTGGTGGACGTGAGCCACGAAGACCCTGAGGTCAAGTTC |
| | | AACTGGTACGTGGACGGCGTGGAGGTGCATAATGCCAAGAC |
| | | AAAGCCGCGGGAGGAGCAGTACAACAGCACGTACCGTGTG |
| | | GTCAGCGTCCTCACCGTCCTGCACCAGGACTGGCTGAATGG |
| | | CAAGGAGTACAAGTGCAAGGTCTCCAACAAAGCCCTCGGCG |
| | | CCCCCATCGAGAAAACCATCTCCAAAGCCAAAGGGCAGCCC |
| | | CGAGAACCACAGGTGTACACCCTGCCCCCATCCCGGGATGA |
| | | GCTGACCAAGAACCAGGTCAGCCTGACCTGCCTGGTCAAAG |
| | | GCTTCTATCCCAGCGACATCGCCGTGGAGTGGGAGAGCAAT |
| | | GGGCAGCCGGAGAACAACTACAAGACCACGCCTCCCGTGCT |
| | | GGACTCCGACGGCTCCTTCTTCCTCTACAGCAAGCTCACCGT |
| | | GGACAAGAGCAGGTGGCAGCAGGGGAACGTCTTCTCATGCT |
| | | CCGTGATGCATGAGGCTCTGCACAACCACTACACGCAGAAG |
| | | AGCCTCTCCCTGTCTCCGGGTAAA |
| | 161 | DIQMTQSPSTLSASVGDRVTITCRASQSISSWLAWYQQKPGKA |
| | (Light chain) | PKLLIYDASSLESGVPSRFSGSGSGTEFTLTISSLQPDDFATYYC |
| | | QQYISYSMLTFGQGTKVEIKRTVAAPSVFIFPPSDEQLKSGTAS |
| | | VVCLLNNFYPREAKVQWKVDNALQSGNSQESVTEQDSKDSTY |
| | | SLSSTLTLSKADYEKHKVYACEVTHQGLSSPVTKSFNRGEC |
| | 162 | QVQLVQSGAEVKKPGSSVKVSCKASGGTFSSYAISWVRQAPG |
| | (Heavy chain) | QGLEWMGGIIPIFGTANYAQKFQGRVTITADKSTSTAYMELSS |
| | | LRSEDTAVYYCAREYGSMDYWGQGTTVTVSSASTKGPSVFPL |
| | | APSSKSTSGGTAALGCLVKDYFPEPVTVSWNSGALTSGVHTFP |
| | | AVLQSSGLYSLSSVVTVPSSSLGTQTYICNVNHKPSNTKVDKK |
| | | VEPKSCDKTHTCPPCPAPEAAGGPSVFLFPPKPKDTLMISRTPE |
| | | VTCVVVDVSHEDPEVKFNWYVDGVEVHNAKTKPREEQYNST |
| | | YRVVSVLTVLHQDWLNGKEYKCKVSNKALGAPIEKTISKAKG |
| | | QPREPQVYTLPPSRDELTKNQVSLTCLVKGFYPSDIAVEWESN |
| | | GQPENNYKTTPPVLDSDGSFFLYSKLTVDKSRWQQGNVFSCSV |
| | | MHEALHNHYTQKSLSLSPGK |
| 20B7 | 163 | GACATCCAGATGACCCAGTCTCCTTCCACCCTGTCTGCATCT |
| | (nucleotide | GTAGGAGACCGTGTCACCATCACTTGCCGTGCCAGTCAGAG |
| | sequence light | TATTAGTAGCTGGTTGGCCTGGTATCAGCAGAAACCAGGGA |
| | chain) | AAGCCCCTAAGCTCCTGATCTATGATGCCTCCAGTTTGGAA |
| | | AGTGGGGTCCCATCACGTTTCAGCGGCAGTGGATCCGGGAC |
| | | AGAATTCACTCTCACCATCAGCAGCTTGCAGCCTGATGATTT |
| | | TGCAACTTATTACTGCCAACAGTATCAGGCTTTTTCGCTTAC |
| | | GTTTGGCCAGGGCACCAAAGTCGAGATCAAGCGTACGGTGG |
| | | CTGCACCATCTGTCTTCATCTTCCCGCCATCTGATGAGCAGT |
| | | TGAAATCTGGAACTGCCTCTGTTGTGTGCCTGCTGAATAACT |
| | | TCTATCCCAGAGAGGCCAAAGTACAGTGGAAGGTGGATAAC |
| | | GCCCTCCAATCGGGTAACTCCCAGGAGAGTGTCACAGAGCA |
| | | GGACAGCAAGGACAGCACCTACAGCCTCAGCAGCACCCTG |
| | | ACGCTGAGCAAAGCAGACTACGAGAAACACAAAGTCTACG |
| | | CCTGCGAAGTCACCCATCAGGGCCTGAGCTCGCCCGTCACA |
| | | AAGAGCTTCAACAGGGGAGAGTGT |
| | 164 | CAGGTGCAATTGGTGCAGTCTGGGGCTGAGGTGAAGAAGCC |
| | (nucleotide | TGGGTCCTCGGTGAAGGTCTCCTGCAAGGCCTCCGGAGGCA |
| | sequence heavy | CATTCAGCAGCTACGCTATAAGCTGGGTGCGACAGGCCCCT |
| | chain) | GGACAAGGGCTCGAGTGGATGGGAGGGATCATCCCTATCTT |
| | | TGGTACAGCAAACTACGCACAGAAGTTCCAGGGCAGGGTCA |
| | | CCATTACTGCAGACAAATCCACGAGCACAGCCTACATGGAG |
| | | CTGAGCAGCCTGAGATCTGAGGACACCGCCGTGTATTACTG |
| | | TGCGAGAGTTAACTACCCGTACTCTTACTGGGGTGACTTCG |
| | | ACTACTGGGGCCAAGGGACCACCGTGACCGTCTCCTCAGCT |
| | | AGCACCAAGGGCCCATCGGTCTTCCCCCTGGCACCCTCCTCC |
| | | AAGAGCACCTCTGGGGGCACAGCGGCCCTGGGCTGCCTGGT |
| | | CAAGGACTACTTCCCCGAACCGGTGACGGTGTCGTGGAACT |
| | | CAGGCGCCCTGACCAGCGGCGTGCACACCTTCCCGGCTGTC |
| | | CTACAGTCCTCAGGACTCTACTCCCTCAGCAGCGTGGTGAC |
| | | CGTGCCCTCCAGCAGCTTGGGCACCCAGACCTACATCTGCA |
| | | ACGTGAATCACAAGCCCAGCAACACCAAGGTGGACAAGAA |
| | | AGTTGAGCCCAAATCTTGTGACAAAACTCACACATGCCCAC |
| | | CGTGCCCAGCACCTGAAGCTGCAGGGGGACCGTCAGTCTTC |
| | | CTCTTCCCCCCAAAACCCAAGGACACCCTCATGATCTCCCG |
| | | GACCCCTGAGGTCACATGCGTGGTGGTGGACGTGAGCCACG |
| | | AAGACCCTGAGGTCAAGTTCAACTGGTACGTGGACGGCGTG |
| | | GAGGTGCATAATGCCAAGACAAAGCCGCGGGAGGAGCAGT |
| | | ACAACAGCACGTACCGTGTGGTCAGCGTCCTCACCGTCCTG |
| | | CACCAGGACTGGCTGAATGGCAAGGAGTACAAGTGCAAGG |
| | | TCTCCAACAAAGCCCTCGGCGCCCCCATCGAGAAAACCATC |
| | | TCCAAAGCCAAAGGGCAGCCCCGAGAACCACAGGTGTACA |
| | | CCCTGCCCCCATCCCGGGATGAGCTGACCAAGAACCAGGTC |
| | | AGCCTGACCTGCCTGGTCAAAGGCTTCTATCCCAGCGACAT |
| | | CGCCGTGGAGTGGGAGAGCAATGGGCAGCCGGAGAACAAC |
| | | TACAAGACCACGCCTCCCGTGCTGGACTCCGACGGCTCCTT |
| | | CTTCCTCTACAGCAAGCTCACCGTGGACAAGAGCAGGTGGC |
| | | AGCAGGGGAACGTCTTCTCATGCTCCGTGATGCATGAGGCT |
| | | CTGCACAACCACTACACGCAGAAGAGCCTCTCCCTGTCTCC |
| | | GGGTAAA |
| | 165 | DIQMTQSPSTLSASVGDRVTITCRASQSISSWLAWYQQKPGKA |
| | (Light chain) | PKLLIYDASSLESGVPSRFSGSGSGTEFTLTISSLQPDDFATYYC |
| | | QQYQAFSLTFGQGTKVEIKRTVAAPSVFIFPPSDEQLKSGTASV |
| | | VCLLNNFYPREAKVQWKVDNALQSGNSQESVTEQDSKDSTYS |
| | | LSSTLTLSKADYEKHKVYACEVTHQGLSSPVTKSFNRGEC |
| | 166 | QVQLVQSGAEVKKPGSSVKVSCKASGGTFSSYAISWVRQAPG |
| | (Heavy chain) | QGLEWMGGIIPIFGTANYAQKFQGRVTITADKSTSTAYMELSS |
| | | LRSEDTAVYYCARVNYPYSYWGDFDYWGQGTTVTVSSASTK |
| | | GPSVFPLAPSSKSTSGGTAALGCLVKDYFPEPVTVSWNSGALT |
| | | SGVHTFPAVLQSSGLYSLSSVVTVPSSSLGTQTYICNVNHKPSN |
| | | TKVDKKVEPKSCDKTHTCPPCPAPEAAGGPSVFLFPPKPKDTL |
| | | MISRTPEVTCVVVDVSHEDPEVKFNWYVDGVEVHNAKTKPRE |
| | | EQYNSTYRVVSVLTVLHQDWLNGKEYKCKVSNKALGAPIEKT |
| | | ISKAKGQPREPQVYTLPPSRDELTKNQVSLTCLVKGFYPSDIAV |
| | | EWESNGQPENNYKTTPPVLDSDGSFFLYSKLTVDKSRWQQGN |
| | | VFSCSVMHEALHNHYTQKSLSLSPGK |
| CLC- | 167 | GAGATCGTGCTGACCCAGAGCCCCGGCACACTCTCCCTGTC |
| 563 | (nucleotide | TCCTGGGGAAAGGGCCACCCTTTCATGCAGAGCCAGCCAGT |
| | sequence light | CCGTCTCTAGTAGCTACCTGGCATGGTATCAGCAGAAGCCA |
| | chain) | GGACAAGCCCCCCGCCTCCTGATTTACGGCGCTTCCTCTCGG |
| | | GCAACTGGTATCCCTGACAGGTTCTCAGGGAGCGGAAGCGG |
| | | AACAGATTTTACCTTGACTATTTCTAGACTGGAGCCAGAGG |
| | | ACTTCGCCGTGTATTACTGTCAGCAGTACGGTAGTAGCCCCC |
| | | TCACCTTTGGCCAGGGGACAAAAGTCGAAATCAAGCGTACG |
| | | GTGGCTGCACCATCTGTCTTCATCTTCCCGCCATCTGATGAG |
| | | CAGTTGAAATCTGGAACTGCCTCTGTTGTGTGCCTGCTGAAT |
| | | AACTTCTATCCCAGAGAGGCCAAAGTACAGTGGAAGGTGGA |
| | | TAACGCCCTCCAATCGGGTAACTCCCAGGAGAGTGTCACAG |
| | | AGCAGGACAGCAAGGACAGCACCTACAGCCTCAGCAGCAC |
| | | CCTGACGCTGAGCAAAGCAGACTACGAGAAACACAAAGTC |
| | | TACGCCTGCGAAGTCACCCATCAGGGCCTGAGCTCGCCCGT |
| | | CACAAAGAGCTTCAACAGGGGAGAGTGT |
| | 168 | GAGGTGCAATTGTTGGAGTCTGGGGGAGGCTTGGTACAGCC |
| | (nucleotide | TGGGGGGTCCCTGAGACTCTCCTGTGCAGCCTCCGGATTCA |
| | sequence heavy | CCTTTAGCAGTTATGCCATGAGCTGGGTCCGCCAGGCTCCA |
| | chain) | GGGAAGGGGCTGGAGTGGGTCTCAGCTATTAGTGGTAGTGG |
| | | TGGTAGCACATACTACGCAGACTCCGTGAAGGGCCGGTTCA |
| | | CCATCTCCAGAGACAATTCCAAGAACACGCTGTATCTGCAG |
| | | ATGAACAGCCTGAGAGCCGAGGACACGGCCGTATATTACTG |
| | | TGCGCTTGACGTTGGTGCTTTCGACTACTGGGGCCAAGGAG |
| | | CCCTGGTCACCGTCTCGAGTGCTAGCACCAAGGGCCCATCG |
| | | GTCTTCCCCCTGGCACCCTCCTCCAAGAGCACCTCTGGGGGC |
| | | ACAGCGGCCCTGGGCTGCCTGGTCAAGGACTACTTCCCCGA |
| | | ACCGGTGACGGTGTCGTGGAACTCAGGCGCCCTGACCAGCG |
| | | GCGTGCACACCTTCCCGGCTGTCCTACAGTCCTCAGGACTCT |
| | | ACTCCCTCAGCAGCGTGGTGACCGTGCCCTCCAGCAGCTTG |
| | | GGCACCCAGACCTACATCTGCAACGTGAATCACAAGCCCAG |
| | | CAACACCAAGGTGGACAAGAAAGTTGAGCCCAAATCTTGTG |
| | | ACAAAACTCACACATGCCCACCGTGCCCAGCACCTGAAGCT |
| | | GCAGGGGGACCGTCAGTCTTCCTCTTCCCCCCAAAACCCAA |
| | | GGACACCCTCATGATCTCCCGGACCCCTGAGGTCACATGCG |
| | | TGGTGGTGGACGTGAGCCACGAAGACCCTGAGGTCAAGTTC |
| | | AACTGGTACGTGGACGGCGTGGAGGTGCATAATGCCAAGAC |
| | | AAAGCCGCGGGAGGAGCAGTACAACAGCACGTACCGTGTG |
| | | GTCAGCGTCCTCACCGTCCTGCACCAGGACTGGCTGAATGG |
| | | CAAGGAGTACAAGTGCAAGGTCTCCAACAAAGCCCTCGGCG |
| | | CCCCCATCGAGAAAACCATCTCCAAAGCCAAAGGGCAGCCC |
| | | CGAGAACCACAGGTGTACACCCTGCCCCCATCCCGGGATGA |
| | | GCTGACCAAGAACCAGGTCAGCCTGACCTGCCTGGTCAAAG |
| | | GCTTCTATCCCAGCGACATCGCCGTGGAGTGGGAGAGCAAT |
| | | GGGCAGCCGGAGAACAACTACAAGACCACGCCTCCCGTGCT |
| | | GGACTCCGACGGCTCCTTCTTCCTCTACAGCAAGCTCACCGT |
| | | GGACAAGAGCAGGTGGCAGCAGGGGAACGTCTTCTCATGCT |
| | | CCGTGATGCATGAGGCTCTGCACAACCACTACACGCAGAAG |
| | | AGCCTCTCCCTGTCTCCGGGTAAA |
| | 169 | EIVLTQSPGTLSLSPGERATLSCRASQSVSSSYLAWYQQKPGQA |
| | (Light chain) | PRLLIYGASSRATGIPDRFSGSGSGTDFTLTISRLEPEDFAVYYC |
| | | QQYGSSPLTFGQGTKVEIKRTVAAPSVFIFPPSDEQLKSGTASV |
| | | VCLLNNFYPREAKVQWKVDNALQSGNSQESVTEQDSKDSTYS |
| | | LSSTLTLSKADYEKHKVYACEVTHQGLSSPVTKSFNRGEC |
| | 170 | EVQLLESGGGLVQPGGSLRLSCAASGFTFSSYAMSWVRQAPG |
| | (Heavy chain) | KGLEWVSAISGSGGSTYYADSVKGRFTISRDNSKNTLYLQMNS |
| | | LRAEDTAVYYCALDVGAFDYWGQGALVTVSSASTKGPSVFPL |
| | | APSSKSTSGGTAALGCLVKDYFPEPVTVSWNSGALTSGVHTFP |
| | | AVLQSSGLYSLSSVVTVPSSSLGTQTYICNVNHKPSNTKVDKK |
| | | VEPKSCDKTHTCPPCPAPEAAGGPSVFLFPPKPKDTLMISRTPE |
| | | VTCVVVDVSHEDPEVKFNWYVDGVEVHNAKTKPREEQYNST |
| | | YRVVSVLTVLHQDWLNGKEYKCKVSNKALGAPIEKTISKAKG |
| | | QPREPQVYTLPPSRDELTKNQVSLTCLVKGFYPSDIAVEWESN |
| | | GQPENNYKTTPPVLDSDGSFFLYSKLTVDKSRWQQGNVFSCSV |
| | | MHEALHNHYTQKSLSLSPGK |
| CLC- | 171 | GAGATCGTGCTGACCCAGAGCCCCGGCACACTCTCCCTGTC |
| 564 | (nucleotide | TCCTGGGGAAAGGGCCACCCTTTCATGCAGAGCCAGCCAGT |
| | sequence light | CCGTCTCTAGTAGCTACCTGGCATGGTATCAGCAGAAGCCA |
| | chain) | GGACAAGCCCCCCGCCTCCTGATTTACGGCGCTTCCTCTCGG |
| | | GCAACTGGTATCCCTGACAGGTTCTCAGGGAGCGGAAGCGG |
| | | AACAGATTTTACCTTGACTATTTCTAGACTGGAGCCAGAGG |
| | | ACTTCGCCGTGTATTACTGTCAGCAGTACGGTAGTAGCCCCC |
| | | TCACCTTTGGCCAGGGGACAAAAGTCGAAATCAAGCGTACG |
| | | GTGGCTGCACCATCTGTCTTCATCTTCCCGCCATCTGATGAG |
| | | CAGTTGAAATCTGGAACTGCCTCTGTTGTGTGCCTGCTGAAT |
| | | AACTTCTATCCCAGAGAGGCCAAAGTACAGTGGAAGGTGGA |
| | | TAACGCCCTCCAATCGGGTAACTCCCAGGAGAGTGTCACAG |
| | | AGCAGGACAGCAAGGACAGCACCTACAGCCTCAGCAGCAC |
| | | CCTGACGCTGAGCAAAGCAGACTACGAGAAACACAAAGTC |
| | | TACGCCTGCGAAGTCACCCATCAGGGCCTGAGCTCGCCCGT |
| | | CACAAAGAGCTTCAACAGGGGAGAGTGT |
| | 172 | GAGGTGCAATTGTTGGAGTCTGGGGGAGGCTTGGTACAGCC |
| | (nucleotide | TGGGGGGTCCCTGAGACTCTCCTGTGCAGCCTCCGGATTCA |
| | sequence heavy | CCTTTAGCAGTTATGCCATGAGCTGGGTCCGCCAGGCTCCA |
| | chain) | GGGAAGGGGCTGGAGTGGGTCTCAGCTATTAGTGGTAGTGG |
| | | TGGTAGCACATACTACGCAGACTCCGTGAAGGGCCGGTTCA |
| | | CCATCTCCAGAGACAATTCCAAGAACACGCTGTATCTGCAG |
| | | ATGAACAGCCTGAGAGCCGAGGACACGGCCGTATATTACTG |
| | | TGCGTTCGACGTTGGTCCGTTCGACTACTGGGGCCAAGGAA |
| | | CCCTGGTCACCGTCTCGAGTGCTAGCACCAAGGGCCCATCG |
| | | GTCTTCCCCCTGGCACCCTCCTCCAAGAGCACCTCTGGGGGC |
| | | ACAGCGGCCCTGGGCTGCCTGGTCAAGGACTACTTCCCCGA |
| | | ACCGGTGACGGTGTCGTGGAACTCAGGCGCCCTGACCAGCG |
| | | GCGTGCACACCTTCCCGGCTGTCCTACAGTCCTCAGGACTCT |
| | | ACTCCCTCAGCAGCGTGGTGACCGTGCCCTCCAGCAGCTTG |
| | | GGCACCCAGACCTACATCTGCAACGTGAATCACAAGCCCAG |
| | | CAACACCAAGGTGGACAAGAAAGTTGAGCCCAAATCTTGTG |
| | | ACAAAACTCACACATGCCCACCGTGCCCAGCACCTGAAGCT |
| | | GCAGGGGGACCGTCAGTCTTCCTCTTCCCCCCAAAACCCAA |
| | | GGACACCCTCATGATCTCCCGGACCCCTGAGGTCACATGCG |
| | | TGGTGGTGGACGTGAGCCACGAAGACCCTGAGGTCAAGTTC |
| | | AACTGGTACGTGGACGGCGTGGAGGTGCATAATGCCAAGAC |
| | | AAAGCCGCGGGAGGAGCAGTACAACAGCACGTACCGTGTG |
| | | GTCAGCGTCCTCACCGTCCTGCACCAGGACTGGCTGAATGG |
| | | CAAGGAGTACAAGTGCAAGGTCTCCAACAAAGCCCTCGGCG |
| | | CCCCCATCGAGAAAACCATCTCCAAAGCCAAAGGGCAGCCC |
| | | CGAGAACCACAGGTGTACACCCTGCCCCCATCCCGGGATGA |
| | | GCTGACCAAGAACCAGGTCAGCCTGACCTGCCTGGTCAAAG |
| | | GCTTCTATCCCAGCGACATCGCCGTGGAGTGGGAGAGCAAT |
| | | GGGCAGCCGGAGAACAACTACAAGACCACGCCTCCCGTGCT |
| | | GGACTCCGACGGCTCCTTCTTCCTCTACAGCAAGCTCACCGT |
| | | GGACAAGAGCAGGTGGCAGCAGGGGAACGTCTTCTCATGCT |
| | | CCGTGATGCATGAGGCTCTGCACAACCACTACACGCAGAAG |
| | | AGCCTCTCCCTGTCTCCGGGTAAA |
| | 173 | EIVLTQSPGTLSLSPGERATLSCRASQSVSSSYLAWYQQKPGQA |
| | (Light chain) | PRLLIYGASSRATGIPDRFSGSGSGTDFTLTISRLEPEDFAVYYC |
| | | QQYGSSPLTFGQGTKVEIKRTVAAPSVFIFPPSDEQLKSGTASV |
| | | VCLLNNFYPREAKVQWKVDNALQSGNSQESVTEQDSKDSTYS |
| | | LSSTLTLSKADYEKHKVYACEVTHQGLSSPVTKSFNRGEC |
| | 174 | EVQLLESGGGLVQPGGSLRLSCAASGFTFSSYAMSWVRQAPG |
| | (Heavy chain) | KGLEWVSAISGSGGSTYYADSVKGRFTISRDNSKNTLYLQMNS |
| | | LRAEDTAVYYCAFDVGPFDYWGQGTLVTVSSASTKGPSVFPL |
| | | APSSKSTSGGTAALGCLVKDYFPEPVTVSWNSGALTSGVHTFP |
| | | AVLQSSGLYSLSSVVTVPSSSLGTQTYICNVNHKPSNTKVDKK |
| | | VEPKSCDKTHTCPPCPAPEAAGGPSVFLFPPKPKDTLMISRTPE |
| | | VTCVVVDVSHEDPEVKFNWYVDGVEVHNAKTKPREEQYNST |
| | | YRVVSVLTVLHQDWLNGKEYKCKVSNKALGAPIEKTISKAKG |
| | | QPREPQVYTLPPSRDELTKNQVSLTCLVKGFYPSDIAVEWESN |
| | | GQPENNYKTTPPVLDSDGSFFLYSKLTVDKSRWQQGNVFSCSV |
| | | MHEALHNHYTQKSLSLSPGK |
| 17A9 | 175 | TCGTCTGAGCTGACTCAGGACCCTGCTGTGTCTGTGGCCTTG |
| | (nucleotide | GGACAGACAGTCAGGATCACATGCCAAGGAGACAGCCTCA |
| | sequence light | GAAGTTATTATGCAAGCTGGTACCAGCAGAAGCCAGGACAG |
| | chain) | GCCCCTGTACTTGTCATCTATGGTAAAAACAACCGGCCCTC |
| | | AGGGATCCCAGACCGATTCTCTGGCTCCAGCTCAGGAAACA |
| | | CAGCTTCCTTGACCATCACTGGGGCTCAGGCGGAAGATGAG |
| | | GCTGACTATTACTGTAACTCCCGTGTTATGCCTCATAATCGC |
| | | GTATTCGGCGGAGGGACCAAGCTGACCGTCCTAGGTCAACC |
| | | CAAGGCTGCCCCCAGCGTGACCCTGTTCCCCCCCAGCAGCG |
| | | AGGAACTGCAGGCCAACAAGGCCACCCTGGTCTGCCTGATC |
| | | AGCGACTTCTACCCAGGCGCCGTGACCGTGGCCTGGAAGGC |
| | | CGACAGCAGCCCCGTGAAGGCCGGCGTGGAGACCACCACC |
| | | CCCAGCAAGCAGAGCAACAACAAGTACGCCGCCAGCAGCT |
| | | ACCTGAGCCTGACCCCCGAGCAGTGGAAGAGCCACAGGTCC |
| | | TACAGCTGCCAGGTGACCCACGAGGGCAGCACCGTGGAGA |
| | | AAACCGTGGCCCCCACCGAGTGCAGC |
| | 176 | GAGGTGCAATTGTTGGAGTCTGGGGGAGGCTTGGTACAGCC |
| | (nucleotide | TGGGGGGTCCCTGAGACTCTCCTGTGCAGCCTCCGGATTCA |
| | sequence heavy | CCTTTAGCAGTTATGCCATGAGCTGGGTCCGCCAGGCTCCA |
| | chain) | GGGAAGGGGCTGGAGTGGGTCTCAGCTATTAGTGGTAGTGG |
| | | TGGTAGCACATACTACGCAGACTCCGTGAAGGGCCGGTTCA |
| | | CCATCTCCAGAGACAATTCCAAGAACACGCTGTATCTGCAG |
| | | ATGAACAGCCTGAGAGCCGAGGACACGGCCGTATATTACTG |
| | | TGCGCGTGTTTTCTACCGTGGTGGTGTTTCTATGGACTACTG |
| | | GGGCCAAGGAACCCTGGTCACCGTCTCGAGTGCTAGCACCA |
| | | AGGGCCCATCGGTCTTCCCCCTGGCACCCTCCTCCAAGAGC |
| | | ACCTCTGGGGGCACAGCGGCCCTGGGCTGCCTGGTCAAGGA |
| | | CTACTTCCCCGAACCGGTGACGGTGTCGTGGAACTCAGGCG |
| | | CCCTGACCAGCGGCGTGCACACCTTCCCGGCTGTCCTACAG |
| | | TCCTCAGGACTCTACTCCCTCAGCAGCGTGGTGACCGTGCCC |
| | | TCCAGCAGCTTGGGCACCCAGACCTACATCTGCAACGTGAA |
| | | TCACAAGCCCAGCAACACCAAGGTGGACAAGAAAGTTGAG |
| | | CCCAAATCTTGTGACAAAACTCACACATGCCCACCGTGCCC |
| | | AGCACCTGAAGCTGCAGGGGGACCGTCAGTCTTCCTCTTCC |
| | | CCCCAAAACCCAAGGACACCCTCATGATCTCCCGGACCCCT |
| | | GAGGTCACATGCGTGGTGGTGGACGTGAGCCACGAAGACCC |
| | | TGAGGTCAAGTTCAACTGGTACGTGGACGGCGTGGAGGTGC |
| | | ATAATGCCAAGACAAAGCCGCGGGAGGAGCAGTACAACAG |
| | | CACGTACCGTGTGGTCAGCGTCCTCACCGTCCTGCACCAGG |
| | | ACTGGCTGAATGGCAAGGAGTACAAGTGCAAGGTCTCCAAC |
| | | AAAGCCCTCGGCGCCCCCATCGAGAAAACCATCTCCAAAGC |
| | | CAAAGGGCAGCCCCGAGAACCACAGGTGTACACCCTGCCCC |
| | | CATCCCGGGATGAGCTGACCAAGAACCAGGTCAGCCTGACC |
| | | TGCCTGGTCAAAGGCTTCTATCCCAGCGACATCGCCGTGGA |
| | | GTGGGAGAGCAATGGGCAGCCGGAGAACAACTACAAGACC |
| | | ACGCCTCCCGTGCTGGACTCCGACGGCTCCTTCTTCCTCTAC |
| | | AGCAAGCTCACCGTGGACAAGAGCAGGTGGCAGCAGGGGA |
| | | ACGTCTTCTCATGCTCCGTGATGCATGAGGCTCTGCACAACC |
| | | ACTACACGCAGAAGAGCCTCTCCCTGTCTCCGGGTAAA |
| | 177 | SSELTQDPAVSVALGQTVRITCQGDSLRSYYASWYQQKPGQA |
| | (Light chain) | PVLVIYGKNNRPSGIPDRFSGSSSGNTASLTITGAQAEDEADYY |
| | | CNSRVMPHNRVFGGGTKLTVLGQPKAAPSVTLFPPSSEELQAN |
| | | KATLVCLISDFYPGAVTVAWKADSSPVKAGVETTTPSKQSNN |
| | | KYAASSYLSLTPEQWKSHRSYSCQVTHEGSTVEKTVAPTECS |
| | 178 | EVQLLESGGGLVQPGGSLRLSCAASGFTFSSYAMSWVRQAPG |
| | (Heavy chain) | KGLEWVSAISGSGGSTYYADSVKGRFTISRDNSKNTLYLQMNS |
| | | LRAEDTAVYYCARVFYRGGVSMDYWGQGTLVTVSSASTKGP |
| | | SVFPLAPSSKSTSGGTAALGCLVKDYFPEPVTVSWNSGALTSG |
| | | VHTFPAVLQSSGLYSLSSVVTVPSSSLGTQTYICNVNHKPSNTK |
| | | VDKKVEPKSCDKTHTCPPCPAPEAAGGPSVFLFPPKPKDTLMIS |
| | | RTPEVTCVVVDVSHEDPEVKFNWYVDGVEVHNAKTKPREEQ |
| | | YNSTYRVVSVLTVLHQDWLNGKEYKCKVSNKALGAPIEKTIS |
| | | KAKGQPREPQVYTLPPSRDELTKNQVSLTCLVKGFYPSDIAVE |
| | | WESNGQPENNYKTTPPVLDSDGSFFLYSKLTVDKSRWQQGNV |
| | | FSCSVMHEALHNHYTQKSLSLSPGK |

[0658] The anti-Ox40 antibodies were produced by co-transfecting HEK293-EBNA cells with the mammalian expression vectors using polyethylenimine. The cells were transfected with the corresponding expression vectors in a 1:1 ratio (“vector heavy chain”:“vector light chain”).

[0659] For production in 500 mL shake flasks, 400 million HEK293 EBNA cells were seeded 24 hours before transfection. For transfection cells were centrifuged for 5 minutes at 210×g, and the supernatant was replaced by pre-warmed CD CHO medium. Expression vectors (200 μg of total DNA) were mixed in 20 mL CD CHO medium. After addition of 540 μL PEI, the solution was vortexed for 15 seconds and incubated for 10 minutes at room temperature. Afterwards, cells were mixed with the DNA/PEI solution, transferred to a 500 mL shake flask and incubated for 3 hours at 37° C. in an incubator with a 5% CO₂ atmosphere. After the incubation, 160 mL of F17 medium was added and cells were cultured for 24 hours. One day after transfection 1 mM valproic acid and 7% Feed with supplements were added. After culturing for 7 days, the supernatant was collected by centrifugation for 15 minutes at 210×g. The solution was sterile filtered (0.22 μm filter), supplemented with sodium azide to a final concentration of 0.01% (w/v), and kept at 4° C.

[0660] Purification of antibody molecules from cell culture supernatants was carried out by affinity chromatography using Protein A as described above for purification of antigen Fc fusions.

[0661] The protein was concentrated and filtered prior to loading on a HiLoad Superdex 200 column (GE Healthcare) equilibrated with 20 mM Histidine, 140 mM NaCl solution of pH 6.0.

[0662] The protein concentration of purified antibodies was determined by measuring the OD at 280 nm, using the molar extinction coefficient calculated on the basis of the amino acid sequence. Purity and molecular weight of the antibodies were analyzed by CE-SDS in the presence and absence of a reducing agent (Invitrogen, USA) using a LabChipGXII (Caliper). The aggregate content of antibody samples was analyzed using a TSKgel G3000 SW XL analytical size-exclusion column (Tosoh) equilibrated in a 25 mM K₂HPO₄, 125 mM NaCl, 200 mM L-Arginine Monohydrocloride, 0.02% (w/v) NaN₃, pH 6.7 running buffer at 25° C.

[0663] Table 14 summarizes the yield and final content of the anti-Ox40 P329G LALA IgG1 antibodies.

TABLE 14
Biochemical analysis of anti-Ox40 P329G LALA IgG1 clones

| | | | | |
|---|---|---|---|---|
| | Yield | Monomer | CE-SDS | CE-SDS |
| Clone | [mg/l] | [%] | (non red) | (red) |

| | | | | | | |
|---|---|---|---|---|---|---|
| 8H9 P329GLALA IgG1 | 7 | 100 | 1.2% | (176 kDa) | 66.9% | (54 kDa) |
| | | | 96.1% | (158 kDa) | 28.9% | (25 kDa) |
| | | | 1.3% | (142 kDa) | | |
| 49B4 P329GLALA IgG1 | 7.5 | 100 | 99% | (163 kDa) | 81% | (61.7 kDa) |
| | | | 1% | (149 kDa) | 18% | (28.9 kDa) |
| 1G4 P329GLALA IgG1 | 1 | 100 | 98.9% | (167.4 kDa) | 80% | (63.4 kDa) |
| | | | | | 19% | (28.9 kDa) |
| | | | 1.1% | (151 kDa) | | |
| 20B7 P329GLALA IgG1 | 17 | 93 | 97.9% | (174 kDa) | 79.8% | (65.4 kDa) |
| | | | | | 19.9% | (29.5 kDa) |
| CLC-563 P329GLALA | 6.2 | 100 | 97.7% | (160 kDa) | 77.7% | (60 kDa) |
| IgG1 | | | | | 19.8% | (26.4 kDa) |
| CLC-564 P329GLALA | 13.5 | 100 | 98.4% | (155 kDa) | 79.3% | (60.1 kDa) |
| IgG1 | | | | | 19.8% | (26.5 kDa) |
| 17A9 P329GLALA IgG1 | 7.5 | 100 | 98.6% | (175 kDa) | 74.1% | (61 kDa) |
| | | | 1.4% | (153 kDa) | 25.5% | (38 kDa) |

### Example 2

### Characterization of Anti-OX40 Antibodies

### 2.1 Binding on Human OX40

### 2.1.1 Surface Plasmon Resonance (Avidity+Affinity)

[0664] Binding of phage-derived OX40-specific antibodies to the recombinant OX40 Fc(kih) was assessed by surface plasmon resonance (SPR). All SPR experiments were performed on a Biacore T200 at 25° C. with HBS-EP as running buffer (0.01 M HEPES pH 7.4, 0.15 M NaCl, 3 mM EDTA, 0.005% Surfactant P20, Biacore, Freiburg/Germany).

[0665] In the same experiment, the species selectivity and the avidity of the interaction between the phage display derived anti-OX40 clones 8H9, 49B4, 1G4, 20B7, CLC-563, CLC-564 and 17A9 (all human IgG1 P329GLALA), and recombinant OX40 (human, cyno and murine) was determined. Biotinylated human, cynomolgus and murine OX40 Fc(kih) were directly coupled to different flow cells of a streptavidin (SA) sensor chip Immobilization levels up to 600 resonance units (RU) were used.

[0666] Phage display derived anti-OX40 human IgG1 P329GLALA antibodies were passed at a concentration range from 2 to 500 nM (3-fold dilution) with a flow of 30 μL/minute through the flow cells over 120 seconds. Complex dissociation was monitored for 210 seconds. Bulk refractive index differences were corrected for by subtracting the response obtained in a reference flow cell, where no protein was immobilized.

[0667] Kinetic constants were derived using the Biacore T200 Evaluation Software (vAA, Biacore AB, Uppsala/Sweden), to fit rate equations for 1:1 Langmuir binding by numerical integration and used to estimate qualitatively the avidity (Table 16).

[0668] In the same experiment, the affinities of the interaction between phage display derived antibodies 8H9, 49B4, 1G4, 20B7, CLC-563 and CLC-564 (human IgG1 P329GLALA) to recombinant OX40 were determined. For this purpose, the ectodomain of human or murine Ox40 was also subcloned in frame with an avi (GLNDIFEAQKIEWHE) and a hexahistidine tag (for the sequences see Table 15) or obtained by cleavage with AcTEV protease and removal of Fc by chromatographical method.

TABLE 15
Nucleotide and amino acid sequences of
monomeric human and murine Ox40 His tag

| SEQ ID NO: | Antigen | Sequence |
|---|---|---|
| 179 | human OX40 His | LHCVGDTYPSNDRCCHECRPGNGMVSRCSRSQNTVCR |
| | | PCGPGFYNDVVSSKPCKPCTWCNLRSGSERKQLCTAT |
| | | QDTVCRCRAGTQPLDSYKPGVDCAPCPPGHFSPGDNQ |
| | | ACKPWTNCTLAGKHTLQPASNSSDAICEDRDPPATQPQ |
| | | ETQGPPARPITVQPTEAWPRTSQGPSTRPVEVPGGRAV |
| | | DEQLYFQGGSGLNDIFEAQKIEWHEARAHHHHHH |
| 180 | murine OX40 His | TARRLNCVKHTYPSGHKCCRECQPGHGMVSRCDHTR |
| | | DTLCHPCETGFYNEAVNYDTCKQCTQCNHRSGSELKQ |
| | | NCTPTQDTVCRCRPGTQPRQDSGYKLGVDCVPCPPGH |
| | | FSPGNNQACKPWTNCTLSGKQTRHPASDSLDAVCEDR |
| | | SLLATLLWETQRPTFRPTTVQSTTVWPRTSELPSPPTLV |
| | | TPEGPVDEQLYFQGGSGLNDIFEAQKIEWHEARAHHH |
| | | HHH |

[0669] Protein production was performed as described above for the Fc-fusion protein. Secreted proteins were purified from cell culture supernatants by chelating chromatography, followed by size exclusion chromatography.

[0670] The first chromatographic step was performed on a NiNTA Superflow Cartridge (5 ml, Qiagen) equilibrated in 20 mM sodium phosphate, 500 nM sodium chloride, pH7.4. Elution was performed by applying a gradient over 12 column volume from 5% to 45% of elution buffer (20 mM sodium phosphate, 500 nM sodium chloride, 500 mM Imidazole, pH7.4).

[0671] The protein was concentrated and filtered prior to loading on a HiLoad Superdex 75 column (GE Healthcare) equilibrated with 2 mM MOPS, 150 mM sodium chloride, 0.02% (w/v) sodium azide solution of pH 7.4.

[0672] Affinity determination was performed using two setups.

[0673] Setup 1)

[0674] Anti-human Fab antibody (Biacore, Freiburg/Germany) was directly coupled on a CMS chip at pH 5.0 using the standard amine coupling kit (Biacore, Freiburg/Germany). The immobilization level was approximately 9000 RU. Phage display derived antibodies to OX40 were captured for 60 seconds at concentrations of 25 to 50 nM. Recombinant human OX40 Fc(kih) was passed at a concentration range from 4 to 1000 nM with a flow of 30 μL/minutes through the flow cells over 120 seconds. The dissociation was monitored for 120 seconds. Bulk refractive index differences were corrected for by subtracting the response obtained on reference flow cell. Here, the antigens were flown over a surface with immobilized anti-human Fab antibody but on which HBS-EP has been injected rather than the antibodies.

[0675] Setup 2)

[0676] Anti-human Fc antibody (Biacore, Freiburg/Germany) was directly coupled on a CM5 chip at pH 5.0 using the standard amine coupling kit (Biacore, Freiburg/Germany). The immobilization level was approximately 8000 RU. Phage display derived antibodies to Ox40 were captured for 60 seconds at concentrations of 20 nM. Recombinant human Ox40 avi His was passed at a concentration range from 2.3 to 600 nM with a flow of 30 μL/minutes through the flow cells over 120 seconds. The dissociation was monitored for 120 seconds. Bulk refractive index differences were corrected for by subtracting the response obtained on reference flow cell. Here, the antigens were flown over a surface with immobilized anti-human Fab antibody but on which HBS-EP has been injected rather than the antibodies.

[0677] Kinetic constants were derived using the Biacore T200 Evaluation Software (vAA, Biacore AB, Uppsala/Sweden), to fit rate equations for 1:1 Langmuir binding by numerical integration.

[0678] Clones 49B4, 1G4 and CLC-564 bind human Ox40 Fc(kih) with a lower affinity than clones 8H9, 20B7 and CLC-563.

[0679] Affinity constants for the interaction between anti-OX40 P329GLALA IgG1 and human OX40 Fc(kih) were determined by fitting to a 1:1 Langmuir binding.

TABLE 16
Binding of anti-OX40 antibodies to recombinant human OX40

| | | Recombinant human OX40 | | | Recombinant human OX40 | | |
|---|---|---|---|---|---|---|---|
| | Recombinant | Fc(kih) (affinity format) | | | His (affinity format) | | |
| | human OX40 | ka | kd | KD | ka | kd | KD |
| Clone | (avidity format) | (1/Ms) | (1/s) | (M) | (1/Ms) | (1/s) | (M) |
| 8H9 | ++++ | 1.6E+05 | 4.5E−03 | 2.8E−08 | 6.5E+04 | 2.0E−03 | 3.1E−08 |
| 49B4 | ++ | 2.5E+05 | 1.3E−01 | 5.1E−07 | 1.4E+06 | 6.7E−01 | 4.6E−07 |
| 1G4 | ++ | 3.0E+05 | 8.4E−08 | 2.8E−07 | 2.3E+06 | 5.7E−01 | 2.5E−07 |
| 20B7 | +++ | 3.2E+04 | 1.3E−03 | 4.2E−08 | 1.2E+05 | 6.6E−04 | 5.6E−09 |
| CLC-563 | ++ | 3.6E+04 | 3.2E−03 | 8.9E−08 | 4.0E+04 | 3.6E−03 | 8.9E−08 |
| CLC-564 | ++++ | 3.2E+04 | 4.2E−03 | 1.3E−07 | 3.8E+05 | 5.3E−03 | 1.4E−08 |

### 2.1.2 Binding to Human Ox40 Expressing Cells: Naïve and Activated Human Peripheral Mononuclear Blood Leukocytes (PBMC)

[0680] Buffy coats were obtained from the Zurich blood donation center. To isolate fresh peripheral blood mononuclear cells (PBMCs) the buffy coat was diluted with the same volume of DPBS (Gibco by Life Technologies, Cat. No. 14190 326). 50 mL polypropylene centrifuge tubes (TPP, Cat.-No. 91050) were supplied with 15 mL Histopaque 1077 (SIGMA Life Science, Cat.-No. 10771, polysucrose and sodium diatrizoate, adjusted to a density of 1.077 g/mL) and the buffy coat solution was layered above the Histopaque 1077. The tubes were centrifuged for 30 min at 400×g, room temperature and with low acceleration and no break. Afterwards the PBMCs were collected from the interface, washed three times with DPBS and resuspended in T cell medium consisting of RPMI 1640 medium (Gibco by Life Technology, Cat. No. 42401-042) supplied with 10% Fetal Bovine Serum (FBS, Gibco by Life Technology, Cat. No. 16000-044, Lot 941273, gamma-irradiated, mycoplasma-free and heat inactivated at 56° C. for 35 min), 1% (v/v) GlutaMAX I (GIBCO by Life Technologies, Cat. No. 35050 038), 1 mM Sodium-Pyruvate (SIGMA, Cat. No. S8636), 1% (v/v) MEM non-essential amino acids (SIGMA, Cat.-No. M7145) and 50 μM β-Mercaptoethanol (SIGMA, M3148).

[0681] PBMCs were used directly after isolation (binding on naïve human PBMCs) or they were stimulated to receive a strong human Ox40 expression on the cell surface of T cells (binding on activated human PBMCs). Therefore naïve PBMCs were cultured for five days in T cell medium supplied with 200 U/mL Proleukin and 2 ug/mL PHA-L in 6-well tissue culture plate and then 1 day on pre-coated 6-well tissue culture plates [2 ug/mL anti-human CD3 (clone OKT3) and 2 ug/mL anti-human CD28 (clone CD28.2)] in T cell medium supplied with 200 U/mL Proleukin at 37° C. and 5% CO₂.

[0682] For detection of Ox40 naïve human PBMC and activated human PBMC were mixed. To enable distinction of naïve from activated human PBMC resting cells were labeled prior to the binding assay using the eFluor670 cell proliferation dye (eBioscience, Cat.-No. 65-0840-85).

[0683] For labeling cells were harvested, washed with pre-warmed (37° C.) DPBS and adjusted to a cell density of 1×10⁷ cells/mL in DPBS. eFluor670 cell proliferation dye (eBioscience, Cat.-No. 65-0840-85) was added to the suspension of naïve human PBMC at a final concentration of 2.5 mM and a final cell density of 0.5×10⁷ cells/mL in DPBS. Cells were then incubated for 10 min at room temperature in the dark. To stop labeling reaction 2 mL FBS were added and cells were washed three times with T cell medium. A one to one mixture of 1×10⁵ naïve, eFluor670 labeled human PBMC and unlabeled activated human PBMC were then added to each well of a round-bottom suspension cell 96-well plates (Greiner bio-one, Cellstar, Cat. No. 650185).

[0684] Plates were centrifuged 4 minutes with 400×g and at 4° C. and supernatant was flicked off. Cell were washed once with 200 μL 4° C. cold FACS buffer (DPBS supplied with 2% FBS, 5 mM EDTA pH8 (Amresco, Cat. No. E177) and 7.5 mM Sodium azide (Sigma-Aldrich S2002)). Cells were incubated in 50 μL/well of 4° C. cold FACS buffer containing titrated anti-Ox40 antibody constructs for 120 minutes at 4° C. Plates were washed four times with 200 μL/well 4° C. FACS buffer to remove unbound construct.

[0685] Cells were stained for 30 minutes at 4° C. in the dark in 25 μL/well 4° C. cold FACS buffer containing fluorescently labeled anti-human CD4 (clone RPA-T4, mouse IgG1 k, BioLegend, Cat.-No. 300532), anti-human CD8 (clone RPa-T8, mouse IgG1k, BioLegend, Cat.-No. 3010441), anti-human CD45 (clone HI30, mouse IgG1k, BioLegend, Cat.-No. 304028), and Fluorescein isothiocyanate (FITC)-conjugated AffiniPure anti-human IgG Fcγ-fragment-specific goat IgG F(ab′)₂ fragment (Jackson ImmunoResearch, Cat.-No. 109-096-098).

[0686] Plates where washed twice with 200 μL/well 4° C. FACS buffer, were finally resuspended in 80 μL/well FACS-buffer containing 0.2 μg/mL DAPI (Santa Cruz Biotec, Cat. No. Sc-3598) and acquired the same day using 5-laser LSR-Fortessa (BD Bioscience with DIVA software).

[0687] As shown in FIGS. 2A-2D, no antibody construct specific for Ox40 bound to resting human CD4+ T-cells or CD8+ T-cells, which do not express Ox40. In contrast, all constructs bound to activated CD8+ or CD4+ T-cells, which do express Ox40. Binding to CD4+ T-cells was much stronger than that to CD8+ T cells. Activated human CD8+ T cells do express only a fraction of the Ox40 levels detected on activated CD4+ T cells. The difference is donor as well as time dependent. The analyzed anti-Ox40 clones varied in their binding strength. The EC₅₀ values are shown in Table 17. For further evaluation of bivalent and monovalent FAP targeted constructs clones with high (8H9) and low (49B4/1G4) binding capacity were chosen.

TABLE 17
EC₅₀ values of binding to activated human CD4 T cells

| Clone | EC₅₀ [nM] |
|---|---|
| 8H9 | 0.59 |
| CLC563 | 1.59 |
| 20B7 | 1.64 |
| 49B4 | 4.19 |
| CLC-564 | 4.63 |
| 1G4 | n.a. |

### 2.2 Binding on Murine OX40

### 2.2.1 Surface Plasmon Resonance (Avidity+Affinity)

[0688] Binding of the phage-derived OX40 specific antibody 20B7 to recombinant murine OX40 Fc(kih) was assessed by surface plasmon resonance as described above for human OX40 Fc(kih) (see Example 2.1.1). Kinetic constants were derived using the Biacore T200 Evaluation Software (vAA, Biacore AB, Uppsala/Sweden), to fit rate equations for 1:1 Langmuir binding by numerical integration and used to estimate qualitatively the avidity (Table 18).

[0689] For affinity determination, due to an unspecific interaction of the Fc fusion protein to the reference flow cell, murine Ox40 His (see Example 2.1.2) or Ox40 Fc(kih) cleaved with AcTEV protease was used. Anti-human Fc antibody (Biacore, Freiburg/Germany) was directly coupled on a CM5 chip at pH 5.0 using the standard amine coupling kit (Biacore, Freiburg/Germany). The immobilization level was approximately 8000 RU. Phage display derived antibodies to OX40 were captured for 60 seconds at concentrations of 25 nM. Recombinant murine OX40 (cleaved by AcTEV digestion following the distributor instruction) was passed at a concentration range from 4.1 to 1000 nM with a flow of 30 μL/minutes through the flow cells over 120 seconds. The dissociation was monitored for 120 seconds. Bulk refractive index differences were corrected for by subtracting the response obtained on reference flow cell. Here, the antigens were flown over a surface with immobilized anti-human Fab antibody but on which HBS-EP has been injected rather than the antibodies.

[0690] Kinetic constants were derived using the Biacore T200 Evaluation Software (vAA, Biacore AB, Uppsala/Sweden), to fit rate equations for 1:1 Langmuir binding by numerical integration. It was shown that clone 20B7 binds murine OX40 (Table 18).

[0691] Affinity constants of interaction between anti-OX40 P329GLALA IgG1 molecules and murine OX40 were derived using the Biacore T200 Evaluation Software (vAA, Biacore AB, Uppsala/Sweden), to fit rate equations for 1:1 Langmuir binding by numerical integration.

TABLE 18
Binding of anti-Ox40 antibody 20B7 to murine OX40

| | | | Recombinant murine OX40 | | |
|---|---|---|---|---|---|
| | | Recombinant | (affinity format) | | |
| | | murine OX40 | ka | | KD |
| Clone | Origin | (avidity format) | (1/Ms) | kd (1/s) | (M) |
| 20B7 | Phage | ++ | 4.9E+04 | 1.8E−02 | 3.6E−07 |
| | display | | | | |

### 2.2.2 Binding to Mouse OX40 Expressing Cells: Naïve and Activated Mouse Splenocytes (Selected Clones)

[0692] Mouse spleens were collected in 3 mL PBS and a single cell suspension was generated using the gentle MACS tubes (Miltenyi Biotec Cat.-No. 130-096-334) and gentleMACS Octo Dissociator (Miltenyi Biotec). Afterwards splenocytes were filtered through a 30 μm pre-separation filters (Miltenyi Biotec Cat.-No. 130-041-407) and centrifuged for 7 min at 350×g and 4° C. Supernatant was aspirated and cells were resuspended in RPMI 1640 medium supplied with 10% (v/v) FBS, 1% (v/v) GlutaMAX-I, 1 mM Sodium-Pyruvate, 1% (v/v) MEM non-essential amino acids, 50 μM β-Mercaptoethanol and 10% Penicillin-Streptomycin (SIGMA, Cat.-No. P4333). 10⁶ cells/mL were cultured for 3 days in a 6-well tissue culture plate coated with 10 μg/mL anti-mouse CD3c Armenian hamster IgG (clone 145-2C11, BioLegend, Cat.-No. 100331) and 2 μg/mL anti-mouse CD28 Syrian hamster IgG (clone 37.51, BioLegend, Cat.-No. 102102). Activated or fresh mouse splenocytes were harvested, washed in DPBS, counted and 0.1×10⁶ cells were transferred to each well of a 96 U-bottom non-tissue culture treated plate. Cells were washed with DPBS and stained in 50 uL FACS buffer containing different concentration of anti-OX40 human IgG1 P329GLALA antibodies (selected binders only). Cells were incubated for 120 min at 4° C. Then cells were washed twice with FACS buffer and stained in 25 μL/well FACS buffer containing anti-mouse CD8b rat IgG2bK-APC-Cy7 (BioLegend, Cat.-No. 100714, clone53-6.7), anti-mouse CD4 rat IgG2bκ-PE-Cy7 (BioLegend, Cat.-No. 100422, clone GK1.5) and FITC-conjugated AffiniPure anti-human IgG Fcγ-fragment-specific goat IgG F(ab′)₂ fragment (Jackson ImmunoResearch, Cat.-No. 109-096-098) for 30 min at 4° C. Plates where washed twice with 200 μL/well 4° C. FACS buffer, cells were finally resuspended in 80 μL/well FACS-buffer containing 0.2 μg/mL DAPI (Santa Cruz Biotec, Cat. No. Sc-3598) and acquired the same day using 5-laser LSR-Fortessa (BD Bioscience with DIVA software).

[0693] As shown in FIGS. 3A-3D, only clone 20B7 and the well characterized mouse specific benchmark antibody OX86 showed binding to activated mouse CD4+ and CD8+ T cells. No binding was observed on resting mouse splenocytes.

### 2.3 Binding on Cynomolgus OX40

[0694] To test the reactivity of selected anti-OX40 binders with cynomolgus cells, PBMC of healthy Macaca fascicularis were isolated from heparinized blood using density gradient centrifugation as described for human cells with minor modifications. Cynomolgus PBMC were isolated with density gradient centrifugation from heparinized fresh blood using lymphoprep medium (90% v/v, Axon Lab, Cat. No. 1114545) diluted with DPBS. Centrifugation was performed at 520×xμ, without brake at room temperature for 30 minutes. Adjacent centrifugation at 150×g at room temperature for 15 minutes was performed to reduce platelets count followed by several centrifugation steps with 400×g at room temperature for 10 minutes to wash PBMC with sterile DPBS. PBMCs were stimulated to receive a strong Ox40 expression on the cell surface of T cells (binding on activated cynomolgus PBMCs). Therefore naïve PBMCs were cultured for 72 hrs on pre-coated 12-well tissue culture plates [10 ug/mL cynomolgus cross-reactive anti-human CD3 (clone SP34)] and 2 ug/mL cynomolgus cross-reactive anti-human CD28 (clone CD28.2)] in T cell medium supplied with 200 U/mL Proleukin at 37° C. and 5% CO₂.

[0695] 0.5×10⁵ activated cynomolgus PBMC were then added to each well of a round-bottom suspension cell 96-well plates (greiner bio-one, cellstar, Cat. No. 650185). Cell were washed once with 200 μL 4° C. cold FACS buffer and were incubated in 50 μL/well of 4° C. cold FACS containing titrated anti-Ox40 antibody constructs for 120 minutes at 4° C. Then, plates were washed four times with 200 μL/well 4° C. FACS buffer. Cells were resuspended in 25 μL/well 4° C. cold FACS buffer containing fluorescently labeled, cynomolgus cross-reactive anti-human CD4 (clone OKT-4, mouse IgG1 k, BD, Cat.-No. 317428), anti-human CD8 (clone HIT8a, mouse IgG1k, BD, Cat.-No. 555369) and FITC-conjugated AffiniPure anti-human IgG Fcγ-fragment-specific goat IgG F(ab′)₂ fragment (Jackson ImmunoResearch, Cat.-No. 109-096-098) and incubated for 30 minutes at 4° C. in the dark. Plates where washed twice with 200 μL/well 4° C. FACS buffer, cells were finally resuspended in 80 μL/well FACS-buffer containing 0.2 μg/mL DAPI (Santa Cruz Biotec, Cat. No. Sc-3598) and acquired the same day using 5-laser LSR-Fortessa (BD Bioscience with DIVA software).

[0696] As shown in FIGS. 4A and 4B, most constructs bound to activated CD4⁺ cynomolgus T-cells. Binding to CD4⁺ T-cells was much stronger than that to CD8⁺ T cells. Expression levels for OX40 are depending on kinetic and strength of stimulation and were optimized for CD4⁺ cynomolgus T cells but not for CD8+ cynomolgus T cells, so that only little OX40 expression was induced on CD8⁺ T cells. The analyzed anti-OX40 clones varied in their binding strength. The EC₅₀ values are shown in Table 19. Due to untypical curve fit no EC₅₀ value could be calculated for clones 8H9, 49B4, 21H4.

TABLE 19
EC₅₀ values of binding to activated cynomolgus CD4 T cells

| Clone | EC₅₀ [nM] |
|---|---|
| 8H9 | n.d. |
| CLC563 | 1.41 |
| 20B7 | 1.52 |
| 49B4 | n.d. |
| CLC-564 | 3.50 |
| 1G4 | 48.20 |

### 2.3.1 Surface Plasmon Resonance (Avidity+Affinity)

[0697] Binding of phage-derived OX40-specific antibodies (all human IgG1 P329GLALA) to the recombinant cynomolgus OX40 Fc(kih) was assessed by surface plasmon resonance (SPR). All SPR experiments were performed on a Biacore T200 at 25° C. with HBS-EP as running buffer (0.01 M HEPES pH 7.4, 0.15 M NaCl, 3 mM EDTA, 0.005% Surfactant P20, Biacore, Freiburg/Germany).

[0698] Biotinylated cynomolgus OX40 Fc(kih) was directly coupled to different flow cells of a streptavidin (SA) sensor chip. Immobilization levels up to 800 resonance units (RU) were used.

[0699] Phage display derived anti-OX40 human IgG1 P329GLALA antibodies were passed at a concentration range from 2 to 500 nM (3-fold dilution) with a flow of 30 μL/minute through the flow cells over 120 seconds. Complex dissociation was monitored for 210 seconds. Bulk refractive index differences were corrected for by subtracting the response obtained in a reference flow cell, where no protein was immobilized.

[0700] Kinetic constants were derived using the Biacore T200 Evaluation Software (vAA, Biacore AB, Uppsala/Sweden), to fit rate equations for 1:1 Langmuir binding by numerical integration and used to estimate qualitatively the avidity (Table 20).

[0701] In the same experiment, the affinities of the interaction between phage display derived antibodies (human IgG1 P329GLALA) to recombinant cynomolgus OX40 Fc(kih) were determined. Anti-human Fab antibody (Biacore, Freiburg/Germany) was directly coupled on a CMS chip at pH 5.0 using the standard amine coupling kit (Biacore, Freiburg/Germany). The immobilization level was approximately 9000 RU. Phage display derived antibodies to Ox40 were captured for 60 seconds at concentrations of 25 to 50 nM. Recombinant cynomolgus Ox40 Fc(kih) was passed at a concentration range from 4 to 1000 nM with a flow of 30 μL/minutes through the flow cells over 120 seconds. The dissociation was monitored for 120 seconds. Bulk refractive index differences were corrected for by subtracting the response obtained on reference flow cell. Here, the antigens were flown over a surface with immobilized anti-human Fab antibody but on which HBS-EP has been injected rather than the antibodies.

[0702] Kinetic constants were derived using the Biacore T200 Evaluation Software (vAA, Biacore AB, Uppsala/Sweden), to fit rate equations for 1:1 Langmuir binding by numerical integration (Table 20).

[0703] Clones 49B4, 1G4 and CLC-564 bind cynomolgus OX40 Fc(kih) with a lower affinity than clones 8H9, 20B7 and CLC-563.

[0704] Affinity constants of interaction between anti-OX40 P329GLALA IgG1 and cynomolgus OX40 Fc(kih) were derived using the Biacore T100 Evaluation Software (vAA, Biacore AB, Uppsala/Sweden), to fit rate equations for 1:1 Langmuir binding by numerical integration.

TABLE 20
Binding of anti-OX40 antibodies to recombinant cynomolgus
OX40 Fc(kih)

| | | | Recombinant cynomolgus OX40 | | |
|---|---|---|---|---|---|
| | | Recombinant | (affinity format) | | |
| | | cynomolgus OX40 | | | KD |
| Clone | Origin | (avidity format) | ka (1/Ms) | kd (1/s) | (M) |
| 8H9 | Phage | ++++ | 1.4E+05 | 9.6E−02 | 6.7E−07 |
| | display | | | | |
| 20B7 | Phage | +++ | 1.57E+04 | 1.66E−02 | 1.1E−06 |
| | display | | | | |
| 49B4 | Phage | ++ | 1.1E+05 | 3.8E−02 | 3.5E−07 |
| | display | | | | |
| 1G4 | Phage | + | Too low to be detected | | |
| | display | | | | |
| CLC- | Phage | +++ | 2.8E+04 | 6.9E−04 | 2.5E−08 |
| 563 | display | | | | |
| CLC- | Phage | +++ | 2.1E+04 | 7.2E−04 | 3.4E−08 |
| 564 | display | | | | |

### 2.3.2 Binding on Cynomolgus OX40 Expressing Cells: Activated Cynomolgus Peripheral Mononuclear Blood Leukocytes (PBMC)

### Binding to Ox40 Negative Tumor Cells

[0705] The lack of binding to Ox40 negative tumor cells was tested using WM266-4 cells (ATCC CRL-1676) and U-87 MG (ATCC HTB-14) tumor cells. To allow separation of both tumor cells, WM266-4 cells were pre-labeled with PKH-26 Red Fluorescence Cell linker Kit (Sigma, Cat.-No. PKH26GL). Cells were harvested and washed three times with RPMI 1640 medium. Pellet was stained for 5 minutes at room temperature in the dark at a final cell density of 1×10⁷ cells in freshly prepared PKH26-Red-stain solution (final concentration [1 nM] in provided diluent C). Excess FBS was added to stop labeling reaction and cell were washed four times with RPMI 1640 medium supplemented with 10% (v/v) FBS, 1% (v/v) GlutaMAX-I to remove excess dye.

[0706] A mixture of 5×10⁴ PKH26 labeled WM266-4 cells and unlabeled U-87 MG cells in DPBS were added to each well of a round-bottom suspension cell 96-well plates. Plates were centrifuged 4 minutes, 400×g, 4° C. and supernatant were flicked off. Cells were washed once with 200 μL DPBS and pellets were resuspended by a short and gentle vortex. All samples were resuspended in 50 μL/well of 4° C. cold FACS buffer containing titrated concentrations of anti-Ox40 human IgG1 P329GLALA antibody constructs for 120 minutes at 4° C. Plates were washed four times with 200 μL/well 4° C. FACS buffer. Cells were resuspended in 25 μL/well 4° C. cold FACS buffer containing FITC-conjugated AffiniPure anti-human IgG Fcγ-fragment-specific goat IgG F(ab′)₂ fragment (Jackson ImmunoResearch, Cat.-No. 109-096-098) and incubated for 30 minutes at 4° C. in the dark. Plates where washed twice with 200 μL/well 4° C. FACS buffer, were finally resuspended in 80 μL/well FACS-buffer containing 0.2 μg/mL DAPI (Santa Cruz Biotec, Cat. No. Sc-3598) and acquired the same day using 5-laser LSR-Fortessa (BD Bioscience with DIVA software).

[0707] As shown in FIGS. 5A and 5B, no antibody construct specific for OX40 bound to OX40 negative human tumor cells WM266-4 and U-78 MG.

### 2.4 Ligand Blocking Property

[0708] To determine the capacity of OX40-specific human IgG1 P329GLALA antibody molecules to interfere with OX40/OX40-ligand interactions human OX40 ligand (R&D systems) was used. Due to the low affinity of the interaction between OX40 and OX40 ligand, a dimeric human OX40 Fc fusion with a C-terminal Ha tag was prepared (FIG. 1B). The nucleotide and amino acid sequences of this dimeric human Ox40 Fc fusion molecule are shown in Table 21. Production and purification were performed as described for the monomeric OX40 Fc(kih) in Example 1.1.

TABLE 21
cDNA and Amino acid sequences of dimeric human
OX40 Fc fusion molecule (composed by 2 Fc chains)

| SEQ ID | | |
|---|---|---|
| NO: | Antigen | Sequence |
| 181 | Nucleotide | CTGCACTGCGTGGGCGACACCTACCCCAGCAACGA |
| | sequence | CCGGTGCTGCCACGAGTGCAGACCCGGCAACGGCA |
| | dimeric human | TGGTGTCCCGGTGCAGCCGGTCCCAGAACACCGTGT |
| | OX40 antigen | GCAGACCTTGCGGCCCTGGCTTCTACAACGACGTGG |
| | Fc | TGTCCAGCAAGCCCTGCAAGCCTTGTACCTGGTGCA |
| | | ACCTGCGGAGCGGCAGCGAGCGGAAGCAGCTGTGT |
| | | ACCGCCACCCAGGATACCGTGTGCCGGTGTAGAGC |
| | | CGGCACCCAGCCCCTGGACAGCTACAAACCCGGCG |
| | | TGGACTGCGCCCCTTGCCCTCCTGGCCACTTCAGCC |
| | | CTGGCGACAACCAGGCCTGCAAGCCTTGGACCAAC |
| | | TGCACCCTGGCCGGCAAGCACACCCTGCAGCCCGCC |
| | | AGCAATAGCAGCGACGCCATCTGCGAGGACCGGGA |
| | | TCCTCCTGCCACCCAGCCTCAGGAAACCCAGGGCCC |
| | | TCCCGCCAGACCCATCACCGTGCAGCCTACAGAGGC |
| | | CTGGCCCAGAACCAGCCAGGGGCCTAGCACCAGAC |
| | | CCGTGGAAGTGCCTGGCGGCAGAGCCGTCGACGAA |
| | | CAGTTATATTTTCAGGGCGGCTCACCCAAATCTGCA |
| | | GACAAAACTCACACATGCCCACCGTGCCCAGCACCT |
| | | GAACTCCTGGGGGGACCGTCAGTCTTCCTCTTCCCC |
| | | CCAAAACCCAAGGACACCCTCATGATCTCCCGGACC |
| | | CCTGAGGTCACATGCGTGGTGGTGGACGTGAGCCA |
| | | CGAAGACCCTGAGGTCAAGTTCAACTGGTACGTGG |
| | | ACGGCGTGGAGGTGCATAATGCCAAGACAAAGCCG |
| | | CGGGAGGAGCAGTACAACAGCACGTACCGTGTGGT |
| | | CAGCGTCCTCACCGTCCTGCACCAGGACTGGCTGAA |
| | | TGGCAAGGAGTACAAGTGCAAGGTCTCCAACAAAG |
| | | CCCTCGGCGCCCCCATCGAGAAAACCATCTCCAAAG |
| | | CCAAAGGGCAGCCCCGAGAACCACAGGTGTACACC |
| | | CTGCCCCCATCCCGGGATGAGCTGACCAAGAACCA |
| | | GGTCAGCCTGACCTGCCTGGTCAAAGGCTTCTATCC |
| | | CAGCGACATCGCCGTGGAGTGGGAGAGCAATGGGC |
| | | AGCCGGAGAACAACTACAAGACCACGCCTCCCGTG |
| | | CTGGACTCCGACGGCTCCTTCTTCCTCTACAGCAAG |
| | | CTCACCGTGGACAAGAGCAGGTGGCAGCAGGGGAA |
| | | CGTCTTCTCATGCTCCGTGATGCATGAGGCTCTGCA |
| | | CAACCACTACACGCAGAAGAGCCTCTCCCTGTCTCC |
| | | GGGTAAATCCGGCTACCCATACGATGTTCCAGATTA |
| | | CGCT |
| 182 | dimeric human | LHCVGDTYPSNDRCCHECRPGNGMVSRCSRSQNTVC |
| | OX40 antigen | RPCGPGFYNDVVSSKPCKPCTWCNLRSGSERKQLCTA |
| | Fc | TQDTVCRCRAGTQPLDSYKPGVDCAPCPPGHFSPGDN |
| | | QACKPWTNCTLAGKHTLQPASNSSDAICEDRDPPATQ |
| | | PQETQGPPARPITVQPTEAWPRTSQGPSTRPVEVPGGR |
| | | AVDEQLYFQGGSPKSADKTHTCPPCPAPELLGGPSVFL |
| | | FPPKPKDTLMISRTPEVTCVVVDVSHEDPEVKFNWYV |
| | | DGVEVHNAKTKPREEQYNSTYRVVSVLTVLHQDWLN |
| | | GKEYKCKVSNKALGAPIEKTISKAKGQPREPQVYTLPP |
| | | SRDELTKNQVSLTCLVKGFYPSDIAVEWESNGQPENN |
| | | YKTTPPVLDSDGSFFLYSKLTVDKSRWQQGNVFSCSV |
| | | MHEALHNHYTQKSLSLSPGKSGYPYDVPDYA |

[0709] Human OX40 ligand (R&D systems) was directly coupled to two flow cells of a CM5 chip at approximately 2500 RU by pH 5.0 using the standard amine coupling kit (Biacore, Freiburg/Germany). Recombinant human Ox40 Fc was passed on the second flow cell at a concentration of 200 nM with a flow of 30 μL/minute over 90 seconds. The dissociation was omitted and the phage derived anti-Ox40 human IgG1P329LALA was passed on both flow cells at a concentration of 500 nM with a flow of 30 μL/minute over 90 seconds. The dissociation was monitored for 60 seconds. Bulk refractive index differences were corrected for by subtracting the response obtained on reference flow cell. Here, the antibodies were flown over a surface with immobilized human OX40 ligand but on which HBS-EP has been injected instead of recombinant human OX40 Fc. FIG. 1C shows the design of the experiment.

[0710] The phage-derived clone 20B7 bound to the complex of human OX40 with its OX40 ligand (Table 22, FIGS. 6A, 6B, 6C, 6D, 6E, and 6F). Thus, this antibody does not compete with the ligand for binding to human OX40 and is therefore termed “non-ligand blocking”. On the contrary, clones 8H9, 1G4, 49B4, CLC-563 and CLC-564 did not bind to human OX40 in complex with its ligand and are therefore termed “ligand blocking”.

TABLE 22
Ligand binding property of the anti-OX40 clones determined
by surface plasmon resonance

| | | | Second injection | |
|---|---|---|---|---|
| | | | (anti-Ox40 | Ligand |
| Clone | Origin | First injection | clone) | blocking |
| 8H9 | Phage | human OX40 Fc | Not binding | YES |
| | display | | | |
| 20B7 | Phage | human OX40 Fc | Binding | NO |
| | display | | | |
| 1G4 | Phage | human OX40 Fc | Not binding | YES |
| | display | | | |
| 49B4 | Phage | human OX40 Fc | Not binding | YES |
| | display | | | |
| CLC-564 | Phage | human OX40 Fc | Not binding | YES |
| | display | | | |
| CLC-564 | Phage | human OX40 Fc | Not binding | YES |
| | display | | | |

### Example 3

### Functional Properties of Anti-Human OX40 Binding Clones

### 3.1 HeLa Cells Expressing Human OX40 and Reporter Gene NF-κB-Luciferase

[0711] Agonstic binding of OX40 to its ligand induces downstream signaling via activation of nuclear factor kappa B (NFκB) (A. D. Weinberg et al., J. Leukoc. Biol. 2004, 75(6), 962-972). The recombinant reporter cell line HeLa_hOx40_NFkB_Luc1 was generated to express human Ox40 on its surface. Additionally, it harbors a reporter plasmid containing the luciferase gene under the control of an NFκB-sensitive enhancer segment. Ox40 triggering induces dose-dependent activation of NFκB, which translocates in the nucleus, where it binds on the NFκB sensitive enhancer of the reporter plasmid to increase expression of the luciferase protein. Luciferase catalyzes luciferin-oxidation resulting in oxyluciferin which emits light. This can be quantified by a luminometer. The scope of one experiment was to test the capacity of the various anti-Ox40 binders in a P329GLALA huIgG1 format to induce NFκB activation in HeLa_hOx40_NFκB_Luc1 reporter cells.

[0712] Adherent HeLa_hOx40_NFκB_Luc1 cells were harvested using cell dissociation buffer (Invitrogen, Cat.-No. 13151-014) for 10 minutes at 37° C. Cells were washed once with DPBS and were adjusted to a cell density of 2×10⁵ in assay media comprising of MEM (Invitrogen, Cat.-No. 22561-021), 10% (v/v) heat-inactivated FBS, 1 mM Sodium-Pyruvate and 1% (v/v) non-essential amino acids. Cells were seeded in a density of 0.3*10⁵cells per well in a sterile white 96-well flat bottom tissue culture plate with lid (greiner bio-one, Cat. No. 655083) and kept over night at 37° C. and 5% CO₂ in an incubator (Hera Cell 150).

[0713] The next day, HeLa_hOX40_NFkB_Luc1 were stimulated for 6 hours adding assay medium containing various titrated anti-OX40 binders in a P329GLALA huIgG1 format. For testing the effect of hyper-crosslinking on anti-OX40 antibodies, 50 μL/well of medium containing secondary antibody anti-human IgG Fcγ-fragment-specific goat IgG F(ab′)₂ fragment (Jackson ImmunoResearch, 109-006-098) were added in a 1:2 ratio (2 times more secondary antibody than the primary single anti-OX40 P329GLALA huIgG1). After incubation, supernatant was aspirated and plates washed two times with DPBS. Quantification of light emission was done using the luciferase 1000 assay system and the reporter lysis buffer (both Promega, Cat.-No. E4550 and Cat-No: E3971) according to manufacturer instructions. Briefly, cells were lysed for 10 minutes at −20° C. by addition of 30 uL per well 1× lysis buffer. Cells were thawed for 20 minutes at 37° C. before 90 uL per well provided luciferase assay reagent was added. Light emission was quantified immediately with a SpectraMax M5/M5e microplate reader (Molecular Devices, USA) using 500 ms integration time, without any filter to collect all wavelengths. Emitted relative light units (URL) were corrected by basal luminescence of HeLa_hOX40_NFκB_Luc1 cells and were blotted against the logarithmic primary antibody concentration using Prism4 (GraphPad Software, USA). Curves were fitted using the inbuilt sigmoidal dose response.

[0714] As shown in FIGS. 7A and 7B, a limited, dose dependent NFκB activation was induced already by addition of anti-OX40 P329GLALA huIgG1 antibodies (left side) to the reporter cell line. Hyper-crosslinking of anti-OX40 antibodies by anti-human IgG specific secondary antibodies strongly increased the induction of NFκB-mediated luciferase-activation in a concentration-dependent manner (right side). The EC₅₀ values of activation are summarized in Table 23.

TABLE 23
EC₅₀ values of NFκB activation in the HeLa_hOx40_NFκB_luc1
reporter cell line co-incubated with anti-Ox40 binders (huIgG1
P329GLALA format) and secondary anti-human IgG
Fcγ spec. antibodies

| Clone | EC₅₀ [nM] |
|---|---|
| 8H9 | 0.66 |
| CLC563 | 1.69 |
| 20B7 | 2.27 |
| 49B4 | 2.42 |
| CLC-564 | 3.23 |
| 1G4 | 3.59 |

### 3.2 OX40 Mediated Costimulation of Suboptimally TCR Triggered Pre-Activated Human CD4 T Cells

[0715] Ligation of OX40 provides a synergistic co-stimulatory signal promoting division and survival of T-cells following suboptimal T-cell receptor (TCR) stimulation (M. Croft et al., Immunol. Rev. 2009, 229(1), 173-191). Additionally, production of several cytokines and surface expression of T-cell activation markers is increased (I. Gramaglia et al., J. Immunol. 1998, 161(12), 6510-6517; S. M. Jensen et al., Seminars in Oncology 2010, 37(5), 524-532).

[0716] To test agonistic properties of various anti-OX40 binders, pre-activated Ox40 positive CD4 T-cells were stimulated for 72 hours with a suboptimal concentration of plate-immobilized anti-CD3 antibodies in the presence of anti-OX40 antibodies, either in solution or immobilized on the plate surface. Effects on T-cell survival and proliferation were analyzed through monitoring of total cell counts and CFSE dilution in living cells by flow cytometry. Additionally, cells were co-stained with fluorescently-labeled antibodies against T-cell activation and differentiation markers, e.g. CD127, CD45RA, Tim-3, CD62L and OX40 itself.

[0717] Human PBMCs were isolated via ficoll density centrifugation and were simulated for three days with PHA-L [2 μg/mL] and Proleukin [200 U/mL] as described under Example 2.1.2. Cells were then labeled with CFSE at a cell density of 1×10⁶ cells/mL with CFDA-SE (Sigma-Aldrich, Cat.-No. 2188) at a final concentration of [50 nM] for 10 minutes at 37° C. Thereafter, cells were washed twice with excess DPBS containing FBS (10% v/v). Labeled cells were rested in T-cell media at 37° C. for 30 minutes. Thereafter, non-converted CFDA-SE was removed by two additional washing steps with DPBS. CD4 T-cell isolation from pre-activated CFSE-labeled human PBMC was performed using the MACS negative CD4 T-cell isolation kit (Miltenyi Biotec) according to manufacturer instructions.

[0718] Morris et al. showed that agonistic co-stimulation with conventional anti-Ox40 antibodies relied on surface immobilization (N. P. Morris et al., Mol. Immunol. 2007, 44(12), 3112-3121). Thus, goat anti-mouse Fcγ-specific antibodies (Jackson ImmunoResearch, Cat. No. 111-500-5008) were coated to the surface of a 96 well U-bottom cell culture plate (Greiner Bio One) at a concentration of [2 μg/mL] in PBS over night at 4° C. in the presence (surface immobilized anti-OX40) or absence (anti-OX40 in solution) of goat anti-human Fcγ-specific antibody (Jackson ImmunoResearch, Ca. No. 109-006-098). Thereafter, the plate surface was blocked with DPBS containing BSA (1% v/w). All following incubation steps were done at 37° C. for 90 minutes in PBS containing BSA (1% v/w). Between the incubation steps, plates were washed with DPBS.

[0719] Mouse anti-human CD3 antibody (clone OKT3, eBioscience, Ca. No. 16-0037-85, fixed concentration [3 ng/mL]) was captured in a subsequent incubation step via the surface coated anti-mouse Fcγ-specific antibodies. In one experiment titrated human anti-OX40 antibodies (human IgG₁ P329G LALA) were then immobilized on plate by an additional incubation step in DPBS. In a second experiment anti-OX40 antibodies were added during the activation assay directly to the media to plates not pre-coated with anti-human IgG Fc specific antibodies.

[0720] CFSE-labeled preactivated CD4+ T cells were added to the pre-coated plates at a cell density of 0.6*10⁵ cells per well in 200 μL T-cell media and cultured for 96 hours. Cells were stained with a combination of fluorochrome-labeled mouse anti-human Ox40 (clone BerACT35, BioLegend, Ca. No. 35008), TIM-3 (clone F38-2E2, Biolegend, Ca. No. 345008), CD127 (clone A019D5, Biolegend, Ca. No. 351234), CD62L (clone DREG 56, Biolegend, Ca. No. 304834) and CD45RA (clone HI100, BD Biosciences, Ca. No. 555489) for 20 minutes at 4° C. in the dark. Plates where washed twice with 200 μL/well 4° C. FACS buffer, were finally resuspended in 80 μL/well FACS-buffer containing 0.2 μg/mL DAPI (Santa Cruz Biotec, Cat. No. Sc-3598) and acquired the same day using 5-laser LSR-Fortessa (BD Bioscience with DIVA software).

[0721] DAPI negative living cells were analyzed for decrease in median CFSE fluorescence as a marker for proliferation. The percentage of OX40 positive, CD62L low and TIM-3 positive T cells was monitored as a marker for T-cell activation. The expression of CD45RA and CD127 was analyzed to determine changes in maturation status of T cell, whereby CD45RA low CD127 low cells were categorized as effector T cells.

[0722] Co-stimulation with plate-immobilized antibodies strongly enhanced suboptimal stimulation of pre-activated human CD4 T cells with plate-immobilized anti-human CD3 in a dose dependent manner (FIGS. 8A, 8B, 8C, 8D, 8E, and 8F). T-cells proliferated stronger, showed a more mature phenotype with a higher percentage of effector T cells and had higher percentages of CD62L low, Tim-3 positive and OX40 positive activated cells. Some clones (8H9, 20B7) out-competed the commercially available detection antibody in binding to cellular OX40. For those no EC₅₀ value calculation was possible and thus all EC₅₀ values for OX40 induction were excluded from overall EC₅₀ value calculation. Half-maximal changes in all other parameters of T-cell activation were achieved at concentrations ranging from 3 to 700 pM and are summarized in FIG. 9 and Table 24. No enhancement in suboptimal TCR stimulation was seen when anti-Ox40 antibodies were added in solution in the absence of surface immobilization (FIGS. 10A, 10B, 10C, 10D, 10E, and 10F). This demonstrated again the strong dependency of Ox40 axis activation on hypercrosslinking of the OX40 receptor.

[0723] A correlation between the binding strength and the agonistic activity (bioactivity) of the anti-OX40 antibodies (hu IgG1 P329GLALA format) is shown in FIG. 11. For most clones there was a direct correlation, however surprisingly two clones (49B4, 1G4) showed a much stronger bioactivity then was predicted from their binding strength.

TABLE 24
EC₅₀ values of rescuing suboptimal TCR stimulation with
plate-immobilized anti-OX40 binders (huIgG1 P329GLALA format)

| Clone | EC₅₀ [nM] | SEM (+/−) |
|---|---|---|
| 8H9 | 0.003 | 0.001 |
| 20B7 | 0.090 | 0.015 |
| CLC-563 | 0.114 | 0.018 |
| CLC-564 | 0.202 | 0.053 |
| 49B4 | 0.591 | 0.237 |
| 1G4 | 0.697 | 0.278 |

### Example 4

### Generation of Bispecific Constructs Targeting Ox40 and Fibroblast Activation Protein (FAP)

### 4.1 Generation of Bispecific Bivalent Antigen Binding Molecules Targeting Ox40 and Fibroblast Activation Protein (FAP) (2+2 Format, Comparative Examples)

[0724] Bispecific agonistic Ox40 antibodies with bivalent binding for Ox40 and for FAP were prepared. The crossmab technology in accordance with International patent application No. WO 2010/145792 A1 was applied to reduce the formation of wrongly paired light chains.

[0725] The generation and preparation of the FAP binders is described in WO 2012/020006 A2, which is incorporated herein by reference.

[0726] In this example, a crossed Fab unit (VHCL) of the FAP binder 28H1 was C-terminally fused to the heavy chain of an anti-OX40 hulgG1 using a (G4S)₄ connector sequence. This heavy chain fusion was co-expressed with the light chain of the anti-OX40 and the corresponding FAP crossed light chain (VLCH1). The Pro329Gly, Leu234Ala and Leu235Ala mutations have been introduced in the constant region of the heavy chains to abrogate binding to Fc gamma receptors according to the method described in International Patent Appl. Publ. No. WO 2012/130831 A1. The resulting bispecific, bivalent construct is depicted in FIG. 12A.

[0727] Table 25 shows, respectively, the nucleotide and amino acid sequences of mature bispecific, bivalent anti-OX40/anti-FAP human IgG1 P329GLALA antibodies.

TABLE 25
Sequences of bispecific, bivalent anti-OX40/anti-FAP
human IgG1 P329GLALA antigen binding molecules

| SEQ ID | | |
|---|---|---|
| NO: | Description | Sequence |
| 183 | (8H9) VHCH1- | CAGGTGCAATTGGTGCAGTCTGGGGCTGAGGTGAAGA |
| | Heavy chain- | AGCCTGGGTCCTCGGTGAAGGTCTCCTGCAAGGCCTCC |
| | (28H1) VHCL | GGAGGCACATTCAGCAGCTACGCTATAAGCTGGGTGCG |
| | (nucleotide | ACAGGCCCCTGGACAAGGGCTCGAGTGGATGGGAGGG |
| | sequence) | ATCATCCCTATCTTTGGTACAGCAAACTACGCACAGAA |
| | | GTTCCAGGGCAGGGTCACCATTACTGCAGACAAATCCA |
| | | CGAGCACAGCCTACATGGAGCTGAGCAGCCTGAGATCT |
| | | GAGGACACCGCCGTGTATTACTGTGCGAGAGAATACG |
| | | GTTGGATGGACTACTGGGGCCAAGGGACCACCGTGAC |
| | | CGTCTCCTCAGCTAGCACCAAGGGCCCATCCGTGTTCC |
| | | CTCTGGCCCCTTCCAGCAAGTCTACCTCTGGCGGCACA |
| | | GCCGCTCTGGGCTGCCTCGTGAAGGACTACTTCCCCGA |
| | | GCCTGTGACAGTGTCCTGGAACTCTGGCGCCCTGACAT |
| | | CCGGCGTGCACACCTTTCCAGCTGTGCTGCAGTCCTCC |
| | | GGCCTGTACTCCCTGTCCTCCGTCGTGACAGTGCCCTCC |
| | | AGCTCTCTGGGCACCCAGACCTACATCTGCAACGTGAA |
| | | CCACAAGCCCTCCAACACCAAGGTGGACAAGAAGGTG |
| | | GAACCCAAGTCCTGCGACAAGACCCACACCTGTCCCCC |
| | | TTGTCCTGCCCCTGAAGCTGCTGGCGGCCCTAGCGTGT |
| | | TCCTGTTCCCCCCAAAGCCCAAGGACACCCTGATGATC |
| | | TCCCGGACCCCCGAAGTGACCTGCGTGGTGGTGGATGT |
| | | GTCCCACGAGGACCCTGAAGTGAAGTTCAATTGGTACG |
| | | TGGACGGCGTGGAAGTGCACAATGCCAAGACCAAGCC |
| | | TAGAGAGGAACAGTACAACTCCACCTACCGGGTGGTGT |
| | | CCGTGCTGACCGTGCTGCACCAGGATTGGCTGAACGGC |
| | | AAAGAGTACAAGTGCAAGGTGTCCAACAAGGCCCTGG |
| | | GAGCCCCCATCGAAAAGACCATCTCCAAGGCCAAGGG |
| | | CCAGCCTCGCGAGCCTCAGGTGTACACCCTGCCCCCTA |
| | | GCAGAGATGAGCTGACCAAGAACCAGGTGTCCCTGAC |
| | | CTGTCTCGTGAAAGGCTTCTACCCCTCCGATATCGCCGT |
| | | GGAATGGGAGAGCAACGGCCAGCCCGAGAACAACTAC |
| | | AAGACCACCCCCCCTGTGCTGGACTCCGACGGCTCATT |
| | | CTTCCTGTACTCTAAGCTGACAGTGGACAAGTCCCGGT |
| | | GGCAGCAGGGCAACGTGTTCTCCTGCTCCGTGATGCAC |
| | | GAGGCCCTGCACAACCACTACACCCAGAAGTCCCTGTC |
| | | CCTGTCTCCCGGGGGAGGCGGAGGATCTGGCGGAGGC |
| | | GGATCCGGTGGTGGCGGATCTGGGGGCGGTGGATCTG |
| | | AGGTGCAGCTGCTGGAATCTGGGGGAGGACTGGTGCA |
| | | GCCAGGCGGATCTCTGAGGCTGTCCTGCGCTGCTTCCG |
| | | GCTTTACCTTCTCCAGCCACGCCATGAGTTGGGTGCGC |
| | | CAGGCACCCGGAAAAGGACTGGAATGGGTGTCAGCCA |
| | | TCTGGGCCTCCGGCGAGCAGTACTACGCCGATAGCGTG |
| | | AAGGGCCGGTTCACCATCTCTCGGGATAACAGCAAGA |
| | | ATACTCTGTACCTGCAGATGAACTCCCTGCGCGCTGAA |
| | | GATACCGCTGTGTATTACTGCGCCAAGGGCTGGCTGGG |
| | | CAACTTCGATTACTGGGGCCAGGGAACCCTCGTGACTG |
| | | TCTCGAGCGCTTCTGTGGCCGCTCCCTCCGTGTTCATCT |
| | | TCCCACCTTCCGACGAGCAGCTGAAGTCCGGCACTGCC |
| | | TCTGTCGTGTGCCTGCTGAACAACTTCTACCCTCGGGA |
| | | AGCCAAGGTGCAGTGGAAAGTGGATAACGCCCTGCAG |
| | | TCCGGCAACTCCCAGGAATCCGTGACCGAGCAGGACTC |
| | | CAAGGACAGCACCTACTCCCTGAGCAGCACCCTGACCC |
| | | TGTCCAAGGCCGACTACGAGAAGCACAAGGTGTACGC |
| | | CTGTGAAGTGACCCACCAGGGCCTGTCCAGCCCCGTGA |
| | | CCAAGTCCTTCAACCGGGGCGAGTGC |
| 151 | VLCL-Light chain | see Table 13 |
| | 1 (8H9) | |
| | (nucleotide | |
| | sequence) | |
| 184 | VLCH1-Light | GAGATCGTGCTGACCCAGTCTCCCGGCACCCTGAGCCT |
| | chain 2 (28H1) | GAGCCCTGGCGAGAGAGCCACCCTGAGCTGCAGAGCC |
| | (nucleotide | AGCCAGAGCGTGAGCCGGAGCTACCTGGCCTGGTATCA |
| | sequence) | GCAGAAGCCCGGCCAGGCCCCCAGACTGCTGATCATCG |
| | | GCGCCAGCACCCGGGCCACCGGCATCCCCGATAGATTC |
| | | AGCGGCAGCGGCTCCGGCACCGACTTCACCCTGACCAT |
| | | CAGCCGGCTGGAACCCGAGGACTTCGCCGTGTACTACT |
| | | GCCAGCAGGGCCAGGTGATCCCCCCCACCTTCGGCCAG |
| | | GGCACCAAGGTGGAAATCAAGAGCTCCGCTAGCACCA |
| | | AGGGCCCCTCCGTGTTTCCTCTGGCCCCCAGCAGCAAG |
| | | AGCACCTCTGGCGGAACAGCCGCCCTGGGCTGCCTGGT |
| | | GAAAGACTACTTCCCCGAGCCCGTGACCGTGTCCTGGA |
| | | ACTCTGGCGCCCTGACCAGCGGCGTGCACACCTTTCCA |
| | | GCCGTGCTGCAGAGCAGCGGCCTGTACTCCCTGAGCAG |
| | | CGTGGTGACAGTGCCCTCCAGCAGCCTGGGCACCCAGA |
| | | CCTACATCTGCAACGTGAACCACAAGCCCAGCAACACC |
| | | AAAGTGGACAAGAAGGTGGAACCCAAGAGCTGCGAC |
| 185 | (8H9) VHCH1- | QVQLVQSGAEVKKPGSSVKVSCKASGGTFSSYAISWVRQ |
| | Heavy chain- | APGQGLEWMGGIIPIFGTANYAQKFQGRVTITADKSTSTA |
| | (28H1) VHCL | YMELSSLRSEDTAVYYCAREYGWMDYWGQGTTVTVSS |
| | | ASTKGPSVFPLAPSSKSTSGGTAALGCLVKDYFPEPVTVS |
| | | WNSGALTSGVHTFPAVLQSSGLYSLSSVVTVPSSSLGTQT |
| | | YICNVNHKPSNTKVDKKVEPKSCDKTHTCPPCPAPEAAG |
| | | GPSVFLFPPKPKDTLMISRTPEVTCVVVDVSHEDPEVKFN |
| | | WYVDGVEVHNAKTKPREEQYNSTYRVVSVLTVLHQDW |
| | | LNGKEYKCKVSNKALGAPIEKTISKAKGQPREPQVYTLPP |
| | | SRDELTKNQVSLTCLVKGFYPSDIAVEWESNGQPENNYK |
| | | TTPPVLDSDGSFFLYSKLTVDKSRWQQGNVFSCSVMHEA |
| | | LHNHYTQKSLSLSPGGGGGSGGGGSGGGGSGGGGSEVQL |
| | | LESGGGLVQPGGSLRLSCAASGFTFSSHAMSWVRQAPGK |
| | | GLEWVSAIWASGEQYYADSVKGRFTISRDNSKNTLYLQM |
| | | NSLRAEDTAVYYCAKGWLGNFDYWGQGTLVTVSSASVA |
| | | APSVFIFPPSDEQLKSGTASVVCLLNNFYPREAKVQWKVD |
| | | NALQSGNSQESVTEQDSKDSTYSLSSTLTLSKADYEKHKV |
| | | YACEVTHQGLSSPVTKSFNRGEC |
| 153 | VLCL-Light chain | see Table 13 |
| | 1 (8H9) | |
| 186 | VLCH1-Light | EIVLTQSPGTLSLSPGERATLSCRASQSVSRSYLAWYQQK |
| | chain 2 (28H1) | PGQAPRLLIIGASTRATGIPDRFSGSGSGTDFTLTISRLEPE |
| | | DFAVYYCQQGQVIPPTFGQGTKVEIKSSASTKGPSVFPLA |
| | | PSSKSTSGGTAALGCLVKDYFPEPVTVSWNSGALTSGVH |
| | | TFPAVLQSSGLYSLSSVVTVPSSSLGTQTYICNVNHKPSNT |
| | | KVDKKVEPKSCD |
| 187 | (49B4) VHCH1- | CAGGTGCAATTGGTGCAGTCTGGGGCTGAGGTGAAGA |
| | Heavy chain- | AGCCTGGGTCCTCGGTGAAGGTCTCCTGCAAGGCCTCC |
| | (28H1) VHCL | GGAGGCACATTCAGCAGCTACGCTATAAGCTGGGTGCG |
| | (nucleotide | ACAGGCCCCTGGACAAGGGCTCGAGTGGATGGGAGGG |
| | sequence) | ATCATCCCTATCTTTGGTACAGCAAACTACGCACAGAA |
| | | GTTCCAGGGCAGGGTCACCATTACTGCAGACAAATCCA |
| | | CGAGCACAGCCTACATGGAGCTGAGCAGCCTGAGATCT |
| | | GAGGACACCGCCGTGTATTACTGTGCGAGAGAATACTA |
| | | CCGTGGTCCGTACGACTACTGGGGCCAAGGGACCACCG |
| | | TGACCGTCTCCTCAGCTAGCACCAAGGGCCCATCCGTG |
| | | TTCCCTCTGGCCCCTTCCAGCAAGTCTACCTCTGGCGGC |
| | | ACAGCCGCTCTGGGCTGCCTCGTGAAGGACTACTTCCC |
| | | CGAGCCTGTGACAGTGTCCTGGAACTCTGGCGCCCTGA |
| | | CATCCGGCGTGCACACCTTTCCAGCTGTGCTGCAGTCC |
| | | TCCGGCCTGTACTCCCTGTCCTCCGTCGTGACAGTGCCC |
| | | TCCAGCTCTCTGGGCACCCAGACCTACATCTGCAACGT |
| | | GAACCACAAGCCCTCCAACACCAAGGTGGACAAGAAG |
| | | GTGGAACCCAAGTCCTGCGACAAGACCCACACCTGTCC |
| | | CCCTTGTCCTGCCCCTGAAGCTGCTGGCGGCCCTAGCG |
| | | TGTTCCTGTTCCCCCCAAAGCCCAAGGACACCCTGATG |
| | | ATCTCCCGGACCCCCGAAGTGACCTGCGTGGTGGTGGA |
| | | TGTGTCCCACGAGGACCCTGAAGTGAAGTTCAATTGGT |
| | | ACGTGGACGGCGTGGAAGTGCACAATGCCAAGACCAA |
| | | GCCTAGAGAGGAACAGTACAACTCCACCTACCGGGTG |
| | | GTGTCCGTGCTGACCGTGCTGCACCAGGATTGGCTGAA |
| | | CGGCAAAGAGTACAAGTGCAAGGTGTCCAACAAGGCC |
| | | CTGGGAGCCCCCATCGAAAAGACCATCTCCAAGGCCA |
| | | AGGGCCAGCCTCGCGAGCCTCAGGTGTACACCCTGCCC |
| | | CCTAGCAGAGATGAGCTGACCAAGAACCAGGTGTCCCT |
| | | GACCTGTCTCGTGAAAGGCTTCTACCCCTCCGATATCG |
| | | CCGTGGAATGGGAGAGCAACGGCCAGCCCGAGAACAA |
| | | CTACAAGACCACCCCCCCTGTGCTGGACTCCGACGGCT |
| | | CATTCTTCCTGTACTCTAAGCTGACAGTGGACAAGTCC |
| | | CGGTGGCAGCAGGGCAACGTGTTCTCCTGCTCCGTGAT |
| | | GCACGAGGCCCTGCACAACCACTACACCCAGAAGTCCC |
| | | TGTCCCTGTCTCCCGGGGGAGGCGGAGGATCTGGCGGA |
| | | GGCGGATCCGGTGGTGGCGGATCTGGGGGCGGTGGAT |
| | | CTGAGGTGCAGCTGCTGGAATCTGGGGGAGGACTGGT |
| | | GCAGCCAGGCGGATCTCTGAGGCTGTCCTGCGCTGCTT |
| | | CCGGCTTTACCTTCTCCAGCCACGCCATGAGTTGGGTG |
| | | CGCCAGGCACCCGGAAAAGGACTGGAATGGGTGTCAG |
| | | CCATCTGGGCCTCCGGCGAGCAGTACTACGCCGATAGC |
| | | GTGAAGGGCCGGTTCACCATCTCTCGGGATAACAGCAA |
| | | GAATACTCTGTACCTGCAGATGAACTCCCTGCGCGCTG |
| | | AAGATACCGCTGTGTATTACTGCGCCAAGGGCTGGCTG |
| | | GGCAACTTCGATTACTGGGGCCAGGGAACCCTCGTGAC |
| | | TGTCTCGAGCGCTTCTGTGGCCGCTCCCTCCGTGTTCAT |
| | | CTTCCCACCTTCCGACGAGCAGCTGAAGTCCGGCACTG |
| | | CCTCTGTCGTGTGCCTGCTGAACAACTTCTACCCTCGGG |
| | | AAGCCAAGGTGCAGTGGAAAGTGGATAACGCCCTGCA |
| | | GTCCGGCAACTCCCAGGAATCCGTGACCGAGCAGGACT |
| | | CCAAGGACAGCACCTACTCCCTGAGCAGCACCCTGACC |
| | | CTGTCCAAGGCCGACTACGAGAAGCACAAGGTGTACG |
| | | CCTGTGAAGTGACCCACCAGGGCCTGTCCAGCCCCGTG |
| | | ACCAAGTCCTTCAACCGGGGCGAGTGC |
| 155 | VLCL-Light chain | see Table 13 |
| | 1 (49B4) | |
| | (nucleotide | |
| | sequence) | |
| 184 | VLCH1-Light | see above |
| | chain 2 (28H1) | |
| | (nucleotide | |
| | sequence) | |
| 188 | (49B4) VHCH1- | QVQLVQSGAEVKKPGSSVKVSCKASGGTFSSYAISWVRQ |
| | Heavy chain- | APGQGLEWMGGIIPIFGTANYAQKFQGRVTITADKSTSTA |
| | (28H1) VHCL | YMELSSLRSEDTAVYYCAREYYRGPYDYWGQGTTVTVS |
| | | SASTKGPSVFPLAPSSKSTSGGTAALGCLVKDYFPEPVTVS |
| | | WNSGALTSGVHTFPAVLQSSGLYSLSSVVTVPSSSLGTQT |
| | | YICNVNHKPSNTKVDKKVEPKSCDKTHTCPPCPAPEAAG |
| | | GPSVFLFPPKPKDTLMISRTPEVTCVVVDVSHEDPEVKFN |
| | | WYVDGVEVHNAKTKPREEQYNSTYRVVSVLTVLHQDW |
| | | LNGKEYKCKVSNKALGAPIEKTISKAKGQPREPQVYTLPP |
| | | SRDELTKNQVSLTCLVKGFYPSDIAVEWESNGQPENNYK |
| | | TTPPVLDSDGSFFLYSKLTVDKSRWQQGNVFSCSVMHEA |
| | | LHNHYTQKSLSLSPGGGGGSGGGGSGGGGSGGGGSEVQL |
| | | LESGGGLVQPGGSLRLSCAASGFTFSSHAMSWVRQAPGK |
| | | GLEWVSAIWASGEQYYADSVKGRFTISRDNSKNTLYLQM |
| | | NSLRAEDTAVYYCAKGWLGNFDYWGQGTLVTVSSASVA |
| | | APSVFIFPPSDEQLKSGTASVVCLLNNFYPREAKVQWKVD |
| | | NALQSGNSQESVTEQDSKDSTYSLSSTLTLSKADYEKHKV |
| | | YACEVTHQGLSSPVTKSFNRGEC |
| 157 | VLCL-Light chain | see Table 13 |
| | 1 (49B4) | |
| 186 | VLCH1-Light | see above |
| | chain 2 (28H1) | |
| 189 | (1G4) VHCH1- | CAGGTGCAATTGGTGCAGTCTGGGGCTGAGGTGAAGA |
| | Heavy chain- | AGCCTGGGTCCTCGGTGAAGGTCTCCTGCAAGGCCTCC |
| | (28H1) VHCL | GGAGGCACATTCAGCAGCTACGCTATAAGCTGGGTGCG |
| | (nucleotide | ACAGGCCCCTGGACAAGGGCTCGAGTGGATGGGAGGG |
| | sequence) | ATCATCCCTATCTTTGGTACAGCAAACTACGCACAGAA |
| | | GTTCCAGGGCAGGGTCACCATTACTGCAGACAAATCCA |
| | | CGAGCACAGCCTACATGGAGCTGAGCAGCCTGAGATCT |
| | | GAGGACACCGCCGTGTATTACTGTGCGAGAGAATACG |
| | | GTTCTATGGACTACTGGGGCCAAGGGACCACCGTGACC |
| | | GTCTCCTCAGCTAGCACCAAGGGCCCATCCGTGTTCCC |
| | | TCTGGCCCCTTCCAGCAAGTCTACCTCTGGCGGCACAG |
| | | CCGCTCTGGGCTGCCTCGTGAAGGACTACTTCCCCGAG |
| | | CCTGTGACAGTGTCCTGGAACTCTGGCGCCCTGACATC |
| | | CGGCGTGCACACCTTTCCAGCTGTGCTGCAGTCCTCCG |
| | | GCCTGTACTCCCTGTCCTCCGTCGTGACAGTGCCCTCCA |
| | | GCTCTCTGGGCACCCAGACCTACATCTGCAACGTGAAC |
| | | CACAAGCCCTCCAACACCAAGGTGGACAAGAAGGTGG |
| | | AACCCAAGTCCTGCGACAAGACCCACACCTGTCCCCCT |
| | | TGTCCTGCCCCTGAAGCTGCTGGCGGCCCTAGCGTGTT |
| | | CCTGTTCCCCCCAAAGCCCAAGGACACCCTGATGATCT |
| | | CCCGGACCCCCGAAGTGACCTGCGTGGTGGTGGATGTG |
| | | TCCCACGAGGACCCTGAAGTGAAGTTCAATTGGTACGT |
| | | GGACGGCGTGGAAGTGCACAATGCCAAGACCAAGCCT |
| | | AGAGAGGAACAGTACAACTCCACCTACCGGGTGGTGT |
| | | CCGTGCTGACCGTGCTGCACCAGGATTGGCTGAACGGC |
| | | AAAGAGTACAAGTGCAAGGTGTCCAACAAGGCCCTGG |
| | | GAGCCCCCATCGAAAAGACCATCTCCAAGGCCAAGGG |
| | | CCAGCCTCGCGAGCCTCAGGTGTACACCCTGCCCCCTA |
| | | GCAGAGATGAGCTGACCAAGAACCAGGTGTCCCTGAC |
| | | CTGTCTCGTGAAAGGCTTCTACCCCTCCGATATCGCCGT |
| | | GGAATGGGAGAGCAACGGCCAGCCCGAGAACAACTAC |
| | | AAGACCACCCCCCCTGTGCTGGACTCCGACGGCTCATT |
| | | CTTCCTGTACTCTAAGCTGACAGTGGACAAGTCCCGGT |
| | | GGCAGCAGGGCAACGTGTTCTCCTGCTCCGTGATGCAC |
| | | GAGGCCCTGCACAACCACTACACCCAGAAGTCCCTGTC |
| | | CCTGTCTCCCGGGGGAGGCGGAGGATCTGGCGGAGGC |
| | | GGATCCGGTGGTGGCGGATCTGGGGGCGGTGGATCTG |
| | | AGGTGCAGCTGCTGGAATCTGGGGGAGGACTGGTGCA |
| | | GCCAGGCGGATCTCTGAGGCTGTCCTGCGCTGCTTCCG |
| | | GCTTTACCTTCTCCAGCCACGCCATGAGTTGGGTGCGC |
| | | CAGGCACCCGGAAAAGGACTGGAATGGGTGTCAGCCA |
| | | TCTGGGCCTCCGGCGAGCAGTACTACGCCGATAGCGTG |
| | | AAGGGCCGGTTCACCATCTCTCGGGATAACAGCAAGA |
| | | ATACTCTGTACCTGCAGATGAACTCCCTGCGCGCTGAA |
| | | GATACCGCTGTGTATTACTGCGCCAAGGGCTGGCTGGG |
| | | CAACTTCGATTACTGGGGCCAGGGAACCCTCGTGACTG |
| | | TCTCGAGCGCTTCTGTGGCCGCTCCCTCCGTGTTCATCT |
| | | TCCCACCTTCCGACGAGCAGCTGAAGTCCGGCACTGCC |
| | | TCTGTCGTGTGCCTGCTGAACAACTTCTACCCTCGGGA |
| | | AGCCAAGGTGCAGTGGAAAGTGGATAACGCCCTGCAG |
| | | TCCGGCAACTCCCAGGAATCCGTGACCGAGCAGGACTC |
| | | CAAGGACAGCACCTACTCCCTGAGCAGCACCCTGACCC |
| | | TGTCCAAGGCCGACTACGAGAAGCACAAGGTGTACGC |
| | | CTGTGAAGTGACCCACCAGGGCCTGTCCAGCCCCGTGA |
| | | CCAAGTCCTTCAACCGGGGCGAGTGC |
| 159 | VLCL-Light chain | see Table 13 |
| | 1 (1G4) | |
| | (nucleotide | |
| | sequence) | |
| 184 | VLCH1-Light | see above |
| | chain 2 (28H1) | |
| | (nucleotide | |
| | sequence) | |
| 190 | (1G4) VHCH1- | QVQLVQSGAEVKKPGSSVKVSCKASGGTFSSYAISWVRQ |
| | Heavy chain- | APGQGLEWMGGIIPIFGTANYAQKFQGRVTITADKSTSTA |
| | (28H1) VHCL | YMELSSLRSEDTAVYYCAREYGSMDYWGQGTTVTVSSA |
| | | STKGPSVFPLAPSSKSTSGGTAALGCLVKDYFPEPVTVSW |
| | | NSGALTSGVHTFPAVLQSSGLYSLSSVVTVPSSSLGTQTYI |
| | | CNVNHKPSNTKVDKKVEPKSCDKTHTCPPCPAPEAAGGP |
| | | SVFLFPPKPKDTLMISRTPEVTCVVVDVSHEDPEVKFNWY |
| | | VDGVEVHNAKTKPREEQYNSTYRVVSVLTVLHQDWLNG |
| | | KEYKCKVSNKALGAPIEKTISKAKGQPREPQVYTLPPSRD |
| | | ELTKNQVSLTCLVKGFYPSDIAVEWESNGQPENNYKTTPP |
| | | VLDSDGSFFLYSKLTVDKSRWQQGNVFSCSVMHEALHN |
| | | HYTQKSLSLSPGGGGGSGGGGSGGGGSGGGGSEVQLLES |
| | | GGGLVQPGGSLRLSCAASGFTFSSHAMSWVRQAPGKGLE |
| | | WVSAIWASGEQYYADSVKGRFTISRDNSKNTLYLQMNSL |
| | | RAEDTAVYYCAKGWLGNFDYWGQGTLVTVSSASVAAPS |
| | | VFIFPPSDEQLKSGTASVVCLLNNFYPREAKVQWKVDNA |
| | | LQSGNSQESVTEQDSKDSTYSLSSTLTLSKADYEKHKVYA |
| | | CEVTHQGLSSPVTKSFNRGEC |
| 161 | VLCL-Light chain | see Table 13 |
| | 1 (1G4) | |
| 186 | VLCH1-Light | see above |
| | chain 2 (28H1) | |
| 191 | (20B7) VHCH1- | CAGGTGCAATTGGTGCAGTCTGGGGCTGAGGTGAAGA |
| | Heavy chain- | AGCCTGGGTCCTCGGTGAAGGTCTCCTGCAAGGCCTCC |
| | (28H1) VHCL | GGAGGCACATTCAGCAGCTACGCTATAAGCTGGGTGCG |
| | (nucleotide | ACAGGCCCCTGGACAAGGGCTCGAGTGGATGGGAGGG |
| | sequence) | ATCATCCCTATCTTTGGTACAGCAAACTACGCACAGAA |
| | | GTTCCAGGGCAGGGTCACCATTACTGCAGACAAATCCA |
| | | CGAGCACAGCCTACATGGAGCTGAGCAGCCTGAGATCT |
| | | GAGGACACCGCCGTGTATTACTGTGCGAGAGTTAACTA |
| | | CCCGTACTCTTACTGGGGTGACTTCGACTACTGGGGCC |
| | | AAGGGACCACCGTGACCGTCTCCTCAGCTAGCACCAAG |
| | | GGCCCATCCGTGTTCCCTCTGGCCCCTTCCAGCAAGTCT |
| | | ACCTCTGGCGGCACAGCCGCTCTGGGCTGCCTCGTGAA |
| | | GGACTACTTCCCCGAGCCTGTGACAGTGTCCTGGAACT |
| | | CTGGCGCCCTGACATCCGGCGTGCACACCTTTCCAGCT |
| | | GTGCTGCAGTCCTCCGGCCTGTACTCCCTGTCCTCCGTC |
| | | GTGACAGTGCCCTCCAGCTCTCTGGGCACCCAGACCTA |
| | | CATCTGCAACGTGAACCACAAGCCCTCCAACACCAAGG |
| | | TGGACAAGAAGGTGGAACCCAAGTCCTGCGACAAGAC |
| | | CCACACCTGTCCCCCTTGTCCTGCCCCTGAAGCTGCTGG |
| | | CGGCCCTAGCGTGTTCCTGTTCCCCCCAAAGCCCAAGG |
| | | ACACCCTGATGATCTCCCGGACCCCCGAAGTGACCTGC |
| | | GTGGTGGTGGATGTGTCCCACGAGGACCCTGAAGTGAA |
| | | GTTCAATTGGTACGTGGACGGCGTGGAAGTGCACAATG |
| | | CCAAGACCAAGCCTAGAGAGGAACAGTACAACTCCAC |
| | | CTACCGGGTGGTGTCCGTGCTGACCGTGCTGCACCAGG |
| | | ATTGGCTGAACGGCAAAGAGTACAAGTGCAAGGTGTC |
| | | CAACAAGGCCCTGGGAGCCCCCATCGAAAAGACCATC |
| | | TCCAAGGCCAAGGGCCAGCCTCGCGAGCCTCAGGTGTA |
| | | CACCCTGCCCCCTAGCAGAGATGAGCTGACCAAGAACC |
| | | AGGTGTCCCTGACCTGTCTCGTGAAAGGCTTCTACCCC |
| | | TCCGATATCGCCGTGGAATGGGAGAGCAACGGCCAGC |
| | | CCGAGAACAACTACAAGACCACCCCCCCTGTGCTGGAC |
| | | TCCGACGGCTCATTCTTCCTGTACTCTAAGCTGACAGTG |
| | | GACAAGTCCCGGTGGCAGCAGGGCAACGTGTTCTCCTG |
| | | CTCCGTGATGCACGAGGCCCTGCACAACCACTACACCC |
| | | AGAAGTCCCTGTCCCTGTCTCCCGGGGGAGGCGGAGGA |
| | | TCTGGCGGAGGCGGATCCGGTGGTGGCGGATCTGGGG |
| | | GCGGTGGATCTGAGGTGCAGCTGCTGGAATCTGGGGG |
| | | AGGACTGGTGCAGCCAGGCGGATCTCTGAGGCTGTCCT |
| | | GCGCTGCTTCCGGCTTTACCTTCTCCAGCCACGCCATGA |
| | | GTTGGGTGCGCCAGGCACCCGGAAAAGGACTGGAATG |
| | | GGTGTCAGCCATCTGGGCCTCCGGCGAGCAGTACTACG |
| | | CCGATAGCGTGAAGGGCCGGTTCACCATCTCTCGGGAT |
| | | AACAGCAAGAATACTCTGTACCTGCAGATGAACTCCCT |
| | | GCGCGCTGAAGATACCGCTGTGTATTACTGCGCCAAGG |
| | | GCTGGCTGGGCAACTTCGATTACTGGGGCCAGGGAACC |
| | | CTCGTGACTGTCTCGAGCGCTTCTGTGGCCGCTCCCTCC |
| | | GTGTTCATCTTCCCACCTTCCGACGAGCAGCTGAAGTC |
| | | CGGCACTGCCTCTGTCGTGTGCCTGCTGAACAACTTCT |
| | | ACCCTCGGGAAGCCAAGGTGCAGTGGAAAGTGGATAA |
| | | CGCCCTGCAGTCCGGCAACTCCCAGGAATCCGTGACCG |
| | | AGCAGGACTCCAAGGACAGCACCTACTCCCTGAGCAG |
| | | CACCCTGACCCTGTCCAAGGCCGACTACGAGAAGCACA |
| | | AGGTGTACGCCTGTGAAGTGACCCACCAGGGCCTGTCC |
| | | AGCCCCGTGACCAAGTCCTTCAACCGGGGCGAGTGC |
| 163 | VLCL-Light chain | see Table 13 |
| | 1 (20B7) | |
| | (nucleotide | |
| | sequence) | |
| 184 | VLCH1-Light | see above |
| | chain 2 (28H1) | |
| | (nucleotide | |
| | sequence) | |
| 192 | (20B7) VHCH1- | QVQLVQSGAEVKKPGSSVKVSCKASGGTFSSYAISWVRQ |
| | Heavy chain- | APGQGLEWMGGIIPIFGTANYAQKFQGRVTITADKSTSTA |
| | (28H1) VHCL | YMELSSLRSEDTAVYYCARVNYPYSYWGDFDYWGQGTT |
| | | VTVSSASTKGPSVFPLAPSSKSTSGGTAALGCLVKDYFPEP |
| | | VTVSWNSGALTSGVHTFPAVLQSSGLYSLSSVVTVPSSSL |
| | | GTQTYICNVNHKPSNTKVDKKVEPKSCDKTHTCPPCPAPE |
| | | AAGGPSVFLFPPKPKDTLMISRTPEVTCVVVDVSHEDPEV |
| | | KFNWYVDGVEVHNAKTKPREEQYNSTYRVVSVLTVLHQ |
| | | DWLNGKEYKCKVSNKALGAPIEKTISKAKGQPREPQVYT |
| | | LPPSRDELTKNQVSLTCLVKGFYPSDIAVEWESNGQPENN |
| | | YKTTPPVLDSDGSFFLYSKLTVDKSRWQQGNVFSCSVMH |
| | | EALHNHYTQKSLSLSPGGGGGSGGGGSGGGGSGGGGSEV |
| | | QLLESGGGLVQPGGSLRLSCAASGFTFSSHAMSWVRQAP |
| | | GKGLEWVSAIWASGEQYYADSVKGRFTISRDNSKNTLYL |
| | | QMNSLRAEDTAVYYCAKGWLGNFDYWGQGTLVTVSSA |
| | | SVAAPSVFIFPPSDEQLKSGTASVVCLLNNFYPREAKVQW |
| | | KVDNALQSGNSQESVTEQDSKDSTYSLSSTLTLSKADYEK |
| | | HKVYACEVTHQGLSSPVTKSFNRGEC |
| 165 | VLCL-Light chain | see Table 13 |
| | 1 (20B7) | |
| 186 | VLCH1-Light | see above |
| | chain 2 (28H1) | |
| 193 | (CLC-563) | GAGGTGCAATTGTTGGAGTCTGGGGGAGGCTTGGTACA |
| | VHCH1-Heavy | GCCTGGGGGGTCCCTGAGACTCTCCTGTGCAGCCTCCG |
| | chain-(28H1) | GATTCACCTTTAGCAGTTATGCCATGAGCTGGGTCCGC |
| | VHCL | CAGGCTCCAGGGAAGGGGCTGGAGTGGGTCTCAGCTA |
| | (nucleotide | TTAGTGGTAGTGGTGGTAGCACATACTACGCAGACTCC |
| | sequence) | GTGAAGGGCCGGTTCACCATCTCCAGAGACAATTCCAA |
| | | GAACACGCTGTATCTGCAGATGAACAGCCTGAGAGCC |
| | | GAGGACACGGCCGTATATTACTGTGCGCTTGACGTTGG |
| | | TGCTTTCGACTACTGGGGCCAAGGAGCCCTGGTCACCG |
| | | TCTCGAGTGCTAGCACCAAGGGCCCATCCGTGTTCCCT |
| | | CTGGCCCCTTCCAGCAAGTCTACCTCTGGCGGCACAGC |
| | | CGCTCTGGGCTGCCTCGTGAAGGACTACTTCCCCGAGC |
| | | CTGTGACAGTGTCCTGGAACTCTGGCGCCCTGACATCC |
| | | GGCGTGCACACCTTTCCAGCTGTGCTGCAGTCCTCCGG |
| | | CCTGTACTCCCTGTCCTCCGTCGTGACAGTGCCCTCCAG |
| | | CTCTCTGGGCACCCAGACCTACATCTGCAACGTGAACC |
| | | ACAAGCCCTCCAACACCAAGGTGGACAAGAAGGTGGA |
| | | ACCCAAGTCCTGCGACAAGACCCACACCTGTCCCCCTT |
| | | GTCCTGCCCCTGAAGCTGCTGGCGGCCCTAGCGTGTTC |
| | | CTGTTCCCCCCAAAGCCCAAGGACACCCTGATGATCTC |
| | | CCGGACCCCCGAAGTGACCTGCGTGGTGGTGGATGTGT |
| | | CCCACGAGGACCCTGAAGTGAAGTTCAATTGGTACGTG |
| | | GACGGCGTGGAAGTGCACAATGCCAAGACCAAGCCTA |
| | | GAGAGGAACAGTACAACTCCACCTACCGGGTGGTGTCC |
| | | GTGCTGACCGTGCTGCACCAGGATTGGCTGAACGGCAA |
| | | AGAGTACAAGTGCAAGGTGTCCAACAAGGCCCTGGGA |
| | | GCCCCCATCGAAAAGACCATCTCCAAGGCCAAGGGCC |
| | | AGCCTCGCGAGCCTCAGGTGTACACCCTGCCCCCTAGC |
| | | AGAGATGAGCTGACCAAGAACCAGGTGTCCCTGACCT |
| | | GTCTCGTGAAAGGCTTCTACCCCTCCGATATCGCCGTG |
| | | GAATGGGAGAGCAACGGCCAGCCCGAGAACAACTACA |
| | | AGACCACCCCCCCTGTGCTGGACTCCGACGGCTCATTC |
| | | TTCCTGTACTCTAAGCTGACAGTGGACAAGTCCCGGTG |
| | | GCAGCAGGGCAACGTGTTCTCCTGCTCCGTGATGCACG |
| | | AGGCCCTGCACAACCACTACACCCAGAAGTCCCTGTCC |
| | | CTGTCTCCCGGGGGAGGCGGAGGATCTGGCGGAGGCG |
| | | GATCCGGTGGTGGCGGATCTGGGGGCGGTGGATCTGA |
| | | GGTGCAGCTGCTGGAATCTGGGGGAGGACTGGTGCAG |
| | | CCAGGCGGATCTCTGAGGCTGTCCTGCGCTGCTTCCGG |
| | | CTTTACCTTCTCCAGCCACGCCATGAGTTGGGTGCGCC |
| | | AGGCACCCGGAAAAGGACTGGAATGGGTGTCAGCCAT |
| | | CTGGGCCTCCGGCGAGCAGTACTACGCCGATAGCGTGA |
| | | AGGGCCGGTTCACCATCTCTCGGGATAACAGCAAGAAT |
| | | ACTCTGTACCTGCAGATGAACTCCCTGCGCGCTGAAGA |
| | | TACCGCTGTGTATTACTGCGCCAAGGGCTGGCTGGGCA |
| | | ACTTCGATTACTGGGGCCAGGGAACCCTCGTGACTGTC |
| | | TCGAGCGCTTCTGTGGCCGCTCCCTCCGTGTTCATCTTC |
| | | CCACCTTCCGACGAGCAGCTGAAGTCCGGCACTGCCTC |
| | | TGTCGTGTGCCTGCTGAACAACTTCTACCCTCGGGAAG |
| | | CCAAGGTGCAGTGGAAAGTGGATAACGCCCTGCAGTC |
| | | CGGCAACTCCCAGGAATCCGTGACCGAGCAGGACTCC |
| | | AAGGACAGCACCTACTCCCTGAGCAGCACCCTGACCCT |
| | | GTCCAAGGCCGACTACGAGAAGCACAAGGTGTACGCC |
| | | TGTGAAGTGACCCACCAGGGCCTGTCCAGCCCCGTGAC |
| | | CAAGTCCTTCAACCGGGGCGAGTGC |
| 167 | VLCL-Light chain | see Table 13 |
| | 1 (CLC-563) | |
| | (nucleotide | |
| | sequence) | |
| 184 | VLCH1-Light | see above |
| | chain 2 (28H1) | |
| | (nucleotide | |
| | sequence) | |
| 194 | (CLC-563) | EVQLLESGGGLVQPGGSLRLSCAASGFTFSSYAMSWVRQ |
| | VHCH1-Heavy | APGKGLEWVSAISGSGGSTYYADSVKGRFTISRDNSKNTL |
| | chain-(28H1) | YLQMNSLRAEDTAVYYCALDVGAFDYWGQGALVTVSS |
| | VHCL | ASTKGPSVFPLAPSSKSTSGGTAALGCLVKDYFPEPVTVS |
| | | WNSGALTSGVHTFPAVLQSSGLYSLSSVVTVPSSSLGTQT |
| | | YICNVNHKPSNTKVDKKVEPKSCDKTHTCPPCPAPEAAG |
| | | GPSVFLFPPKPKDTLMISRTPEVTCVVVDVSHEDPEVKFN |
| | | WYVDGVEVHNAKTKPREEQYNSTYRVVSVLTVLHQDW |
| | | LNGKEYKCKVSNKALGAPIEKTISKAKGQPREPQVYTLPP |
| | | SRDELTKNQVSLTCLVKGFYPSDIAVEWESNGQPENNYK |
| | | TTPPVLDSDGSFFLYSKLTVDKSRWQQGNVFSCSVMHEA |
| | | LHNHYTQKSLSLSPGGGGGSGGGGSGGGGSGGGGSEVQL |
| | | LESGGGLVQPGGSLRLSCAASGFTFSSHAMSWVRQAPGK |
| | | GLEWVSAIWASGEQYYADSVKGRFTISRDNSKNTLYLQM |
| | | NSLRAEDTAVYYCAKGWLGNFDYWGQGTLVTVSSASVA |
| | | APSVFIFPPSDEQLKSGTASVVCLLNNFYPREAKVQWKVD |
| | | NALQSGNSQESVTEQDSKDSTYSLSSTLTLSKADYEKHKV |
| | | YACEVTHQGLSSPVTKSFNRGEC |
| 169 | VLCL-Light chain | see Table 13 |
| | 1 (CLC-563) | |
| 186 | VLCH1-Light | see above |
| | chain 2 (28H1) | |
| 195 | (CLC-564) | GAGGTGCAATTGTTGGAGTCTGGGGGAGGCTTGGTACA |
| | VHCH1-Heavy | GCCTGGGGGGTCCCTGAGACTCTCCTGTGCAGCCTCCG |
| | chain-(28H1) | GATTCACCTTTAGCAGTTATGCCATGAGCTGGGTCCGC |
| | VHCL | CAGGCTCCAGGGAAGGGGCTGGAGTGGGTCTCAGCTA |
| | (nucleotide | TTAGTGGTAGTGGTGGTAGCACATACTACGCAGACTCC |
| | sequence) | GTGAAGGGCCGGTTCACCATCTCCAGAGACAATTCCAA |
| | | GAACACGCTGTATCTGCAGATGAACAGCCTGAGAGCC |
| | | GAGGACACGGCCGTATATTACTGTGCGTTCGACGTTGG |
| | | TCCGTTCGACTACTGGGGCCAAGGAACCCTGGTCACCG |
| | | TCTCGAGTGCTAGCACCAAGGGCCCATCCGTGTTCCCT |
| | | CTGGCCCCTTCCAGCAAGTCTACCTCTGGCGGCACAGC |
| | | CGCTCTGGGCTGCCTCGTGAAGGACTACTTCCCCGAGC |
| | | CTGTGACAGTGTCCTGGAACTCTGGCGCCCTGACATCC |
| | | GGCGTGCACACCTTTCCAGCTGTGCTGCAGTCCTCCGG |
| | | CCTGTACTCCCTGTCCTCCGTCGTGACAGTGCCCTCCAG |
| | | CTCTCTGGGCACCCAGACCTACATCTGCAACGTGAACC |
| | | ACAAGCCCTCCAACACCAAGGTGGACAAGAAGGTGGA |
| | | ACCCAAGTCCTGCGACAAGACCCACACCTGTCCCCCTT |
| | | GTCCTGCCCCTGAAGCTGCTGGCGGCCCTAGCGTGTTC |
| | | CTGTTCCCCCCAAAGCCCAAGGACACCCTGATGATCTC |
| | | CCGGACCCCCGAAGTGACCTGCGTGGTGGTGGATGTGT |
| | | CCCACGAGGACCCTGAAGTGAAGTTCAATTGGTACGTG |
| | | GACGGCGTGGAAGTGCACAATGCCAAGACCAAGCCTA |
| | | GAGAGGAACAGTACAACTCCACCTACCGGGTGGTGTCC |
| | | GTGCTGACCGTGCTGCACCAGGATTGGCTGAACGGCAA |
| | | AGAGTACAAGTGCAAGGTGTCCAACAAGGCCCTGGGA |
| | | GCCCCCATCGAAAAGACCATCTCCAAGGCCAAGGGCC |
| | | AGCCTCGCGAGCCTCAGGTGTACACCCTGCCCCCTAGC |
| | | AGAGATGAGCTGACCAAGAACCAGGTGTCCCTGACCT |
| | | GTCTCGTGAAAGGCTTCTACCCCTCCGATATCGCCGTG |
| | | GAATGGGAGAGCAACGGCCAGCCCGAGAACAACTACA |
| | | AGACCACCCCCCCTGTGCTGGACTCCGACGGCTCATTC |
| | | TTCCTGTACTCTAAGCTGACAGTGGACAAGTCCCGGTG |
| | | GCAGCAGGGCAACGTGTTCTCCTGCTCCGTGATGCACG |
| | | AGGCCCTGCACAACCACTACACCCAGAAGTCCCTGTCC |
| | | CTGTCTCCCGGGGGAGGCGGAGGATCTGGCGGAGGCG |
| | | GATCCGGTGGTGGCGGATCTGGGGGCGGTGGATCTGA |
| | | GGTGCAGCTGCTGGAATCTGGGGGAGGACTGGTGCAG |
| | | CCAGGCGGATCTCTGAGGCTGTCCTGCGCTGCTTCCGG |
| | | CTTTACCTTCTCCAGCCACGCCATGAGTTGGGTGCGCC |
| | | AGGCACCCGGAAAAGGACTGGAATGGGTGTCAGCCAT |
| | | CTGGGCCTCCGGCGAGCAGTACTACGCCGATAGCGTGA |
| | | AGGGCCGGTTCACCATCTCTCGGGATAACAGCAAGAAT |
| | | ACTCTGTACCTGCAGATGAACTCCCTGCGCGCTGAAGA |
| | | TACCGCTGTGTATTACTGCGCCAAGGGCTGGCTGGGCA |
| | | ACTTCGATTACTGGGGCCAGGGAACCCTCGTGACTGTC |
| | | TCGAGCGCTTCTGTGGCCGCTCCCTCCGTGTTCATCTTC |
| | | CCACCTTCCGACGAGCAGCTGAAGTCCGGCACTGCCTC |
| | | TGTCGTGTGCCTGCTGAACAACTTCTACCCTCGGGAAG |
| | | CCAAGGTGCAGTGGAAAGTGGATAACGCCCTGCAGTC |
| | | CGGCAACTCCCAGGAATCCGTGACCGAGCAGGACTCC |
| | | AAGGACAGCACCTACTCCCTGAGCAGCACCCTGACCCT |
| | | GTCCAAGGCCGACTACGAGAAGCACAAGGTGTACGCC |
| | | TGTGAAGTGACCCACCAGGGCCTGTCCAGCCCCGTGAC |
| | | CAAGTCCTTCAACCGGGGCGAGTGC |
| 171 | VLCL-Light chain | see Table 13 |
| | 1 (CLC-564) | |
| | (nucleotide | |
| | sequence) | |
| 184 | VLCH1-Light | see above |
| | chain 2 (28H1) | |
| | (nucleotide | |
| | sequence) | |
| 196 | (CLC-564) | EVQLLESGGGLVQPGGSLRLSCAASGFTFSSYAMSWVRQ |
| | VHCH1-Heavy | APGKGLEWVSAISGSGGSTYYADSVKGRFTISRDNSKNTL |
| | chain-(28H1) | YLQMNSLRAEDTAVYYCAFDVGPFDYWGQGTLVTVSSA |
| | VHCL | STKGPSVFPLAPSSKSTSGGTAALGCLVKDYFPEPVTVSW |
| | | NSGALTSGVHTFPAVLQSSGLYSLSSVVTVPSSSLGTQTYI |
| | | CNVNHKPSNTKVDKKVEPKSCDKTHTCPPCPAPEAAGGP |
| | | SVFLFPPKPKDTLMISRTPEVTCVVVDVSHEDPEVKFNWY |
| | | VDGVEVHNAKTKPREEQYNSTYRVVSVLTVLHQDWLNG |
| | | KEYKCKVSNKALGAPIEKTISKAKGQPREPQVYTLPPSRD |
| | | ELTKNQVSLTCLVKGFYPSDIAVEWESNGQPENNYKTTPP |
| | | VLDSDGSFFLYSKLTVDKSRWQQGNVFSCSVMHEALHN |
| | | HYTQKSLSLSPGGGGGSGGGGSGGGGSGGGGSEVQLLES |
| | | GGGLVQPGGSLRLSCAASGFTFSSHAMSWVRQAPGKGLE |
| | | WVSAIWASGEQYYADSVKGRFTISRDNSKNTLYLQMNSL |
| | | RAEDTAVYYCAKGWLGNFDYWGQGTLVTVSSASVAAPS |
| | | VFIFPPSDEQLKSGTASVVCLLNNFYPREAKVQWKVDNA |
| | | LQSGNSQESVTEQDSKDSTYSLSSTLTLSKADYEKHKVYA |
| | | CEVTHQGLSSPVTKSFNRGEC |
| 173 | VLCL-Light chain | see Table 13 |
| | 1 (CLC-564) | |
| 186 | VLCH1-Light | see above |
| | chain 2 (28H1) | |

[0728] All genes were transiently expressed under control of a chimeric MPSV promoter consisting of the MPSV core promoter combined with the CMV promoter enhancer fragment. The expression vector also contains the oriP region for episomal replication in EBNA (Epstein Barr Virus Nuclear Antigen) containing host cells.

[0729] The bispecific anti-Ox40, anti-FAP constructs were produced by co-transfecting HEK293-EBNA cells with the mammalian expression vectors using polyethylenimine. The cells were transfected with the corresponding expression vectors in a 1:1:1 ratio (“vector heavy chain”:“vector light chain1”:“vector light chain2”).

[0730] For production in 500 mL shake flasks, 400 million HEK293 EBNA cells were seeded 24 hours before transfection. For transfection cells were centrifuged for 5 minutes by 210×g, and supernatant was replaced by pre-warmed CD CHO medium. Expression vectors were mixed in 20 mL CD CHO medium to a final amount of 200 μg DNA. After addition of 540 μL PEI, the solution was vortexed for 15 seconds and incubated for 10 minutes at room temperature. Afterwards, cells were mixed with the DNA/PEI solution, transferred to a 500 mL shake flask and incubated for 3 hours at 37° C. in an incubator with a 5% CO₂ atmosphere. After the incubation, 160 mL F17 medium was added and cells were cultured for 24 hours. One day after transfection 1 mM valproic acid and 7% Feed were added. After culturing for 7 days, the cell supernatant was collected by centrifugation for 15 minutes at 210×g. The solution was sterile filtered (0.22 μm filter), supplemented with sodium azide to a final concentration of 0.01% (w/v), and kept at 4° C.

[0731] Purification of bispecific constructs from cell culture supernatants was carried out by affinity chromatography using Protein A as described above for purification of antigen-Fc fusions and antibodies.

[0732] The protein was concentrated and filtered prior to loading on a HiLoad Superdex 200 column (GE Healthcare) equilibrated with 20 mM Histidine, 140 mM NaCl solution of pH 6.0.

[0733] The protein concentration of purified bispecific constructs was determined by measuring the OD at 280 nm, using the molar extinction coefficient calculated on the basis of the amino acid sequence. Purity and molecular weight of the bispecific constructs were analyzed by CE-SDS in the presence and absence of a reducing agent (Invitrogen, USA) using a LabChipGXII (Caliper). The aggregate content of bispecific constructs was analyzed using a TSKgel G3000 SW XL analytical size-exclusion column (Tosoh) equilibrated in a 25 mM K₂HPO₄, 125 mM NaCl, 200 mM L-Arginine Monohydrocloride, 0.02% (w/v) NaN₃, pH 6.7 running buffer at 25° C. (Table 26).

TABLE 26
Biochemical analysis of exemplary bispecific, bivalent anti-Ox40/anti-FAP
IgG1 P329G LALA antigen binding molecules

| | Yield | Monomer | CE-SDS | | CE-SDS | |
|---|---|---|---|---|---|---|
| Clone | [mg/l] | [%] | (non red) | | (red) | |
| 8H9/FAP P329GLALA IgG1 | 58 | 100 | 95.3% | (254 kDa) | 3.2% | (114 kDa) |
| 2 + 2 | | | 3% | (237 kDa) | 71.3% | (90.7 kDa) |
| | | | | | 13.3% | (28.9 kDa) |
| | | | | | 11.9% | (26.2 kDa) |
| 49B4/FAP P329GLALA IgG1 | 17 | 99 | 98.9% | (253 kDa) | 3.% | (116 kDa) |
| 2 + 2 | | | | | 71.4% | (92 kDa) |
| | | | | | 12.9% | (28.9 kDa) |
| | | | | | 12.1% | (25.7 kDa) |
| 1G4/FAP P329GLALA IgG1 | 0.5 | 99.1 | 93.9% | (234 kDa) | 55.5% | (90.6 kDa) |
| 2 + 2 | | | 3.2% | (242 kDa) | 20.7% | (27 kDa) |
| | | | 1.2% | (244 kDa) | 21.6% | (25 kDa) |
| 20B7/FAP P329GLALA IgG1 | 14 | 97.2 | 91.5% | (244 kDa) | 54.1% | (89 kDa) |
| 2 + 2 | | | 2.3% | (227 kDa) | 19% | (27 kDa) |
| | | | 1.4% | (218 kDa) | 25% | (24 kDa) |
| | | | 1.5% | (202 kDa) | | |

### 4.2 Generation of Bispecific Monovalent Antigen Binding Molecules Targeting Ox40 and Fibroblast Activation Protein (FAP) (1+1 Format, Comparative Examples)

[0734] Bispecific agonistic Ox40 antibodies with monovalent binding for Ox40 and for FAP were prepared by applying the crossmab technology according to International patent application No. WO 2010/145792 A1 to reduce the formation of wrongly paired light chains.

[0735] In this example, a crossed Fab unit (VHCL) of the FAP binder 28H1 was fused to the hole heavy chain of a hulgG1. The Fab against anti-Ox40 was fused to the knob heavy chain. Combination of the targeted anti-FAP-Fc hole with the anti-Ox40-Fc knob chain allows generation of a heterodimer, which includes a FAP binding Fab and an Ox40 binding Fab (FIG. 12B).

[0736] The Pro329Gly, Leu234Ala and Leu235Ala mutations have been introduced in the constant region of the heavy chains to abrogate binding to Fc gamma receptors according to the method described in International Patent Appl. Publ. No. WO 2012/130831 A1.

[0737] The resulting bispecific, monovalent construct is depicted in FIG. 12B and the nucleotide and amino acid sequences can be found in Table 27.

TABLE 27
cDNA and amino acid sequences of mature bispecific monovalent
anti-Ox40/anti-FAP huIgG1 P329GLALA kih antibodies

| SEQ ID | | |
|---|---|---|
| NO: | Description | Sequence |
| 197 | (28H1) VHCL-heavy | GAAGTGCAGCTGCTGGAATCCGGCGGAGGCCTGGTG |
| | chain hole | CAGCCTGGCGGATCTCTGAGACTGTCCTGCGCCGCC |
| | (nucleotide sequence) | TCCGGCTTCACCTTCTCCTCCCACGCCATGTCCTGGG |
| | | TCCGACAGGCTCCTGGCAAAGGCCTGGAATGGGTGT |
| | | CCGCCATCTGGGCCTCCGGCGAGCAGTACTACGCCG |
| | | ACTCTGTGAAGGGCCGGTTCACCATCTCCCGGGACA |
| | | ACTCCAAGAACACCCTGTACCTGCAGATGAACTCCC |
| | | TGCGGGCCGAGGACACCGCCGTGTACTACTGTGCCA |
| | | AGGGCTGGCTGGGCAACTTCGACTACTGGGGACAGG |
| | | GCACCCTGGTCACCGTGTCCAGCGCTAGCGTGGCCG |
| | | CTCCCAGCGTGTTCATCTTCCCACCCAGCGACGAGC |
| | | AGCTGAAGTCCGGCACAGCCAGCGTGGTGTGCCTGC |
| | | TGAACAACTTCTACCCCCGCGAGGCCAAGGTGCAGT |
| | | GGAAGGTGGACAACGCCCTGCAGAGCGGCAACAGC |
| | | CAGGAATCCGTGACCGAGCAGGACAGCAAGGACTC |
| | | CACCTACAGCCTGAGCAGCACCCTGACCCTGAGCAA |
| | | GGCCGACTACGAGAAGCACAAGGTGTACGCCTGCG |
| | | AAGTGACCCACCAGGGCCTGTCCAGCCCCGTGACCA |
| | | AGAGCTTCAACCGGGGCGAGTGCGACAAGACCCAC |
| | | ACCTGTCCCCCTTGCCCTGCCCCTGAAGCTGCTGGTG |
| | | GCCCTTCCGTGTTCCTGTTCCCCCCAAAGCCCAAGG |
| | | ACACCCTGATGATCAGCCGGACCCCCGAAGTGACCT |
| | | GCGTGGTGGTCGATGTGTCCCACGAGGACCCTGAAG |
| | | TGAAGTTCAATTGGTACGTGGACGGCGTGGAAGTGC |
| | | ACAATGCCAAGACCAAGCCGCGGGAGGAGCAGTAC |
| | | AACAGCACGTACCGTGTGGTCAGCGTCCTCACCGTC |
| | | CTGCACCAGGACTGGCTGAATGGCAAGGAGTACAA |
| | | GTGCAAGGTCTCCAACAAAGCCCTCGGCGCCCCCAT |
| | | CGAGAAAACCATCTCCAAAGCCAAAGGGCAGCCCC |
| | | GAGAACCACAGGTGTGCACCCTGCCCCCATCCCGGG |
| | | ATGAGCTGACCAAGAACCAGGTCAGCCTCTCGTGCG |
| | | CAGTCAAAGGCTTCTATCCCAGCGACATCGCCGTGG |
| | | AGTGGGAGAGCAATGGGCAGCCGGAGAACAACTAC |
| | | AAGACCACGCCTCCCGTGCTGGACTCCGACGGCTCC |
| | | TTCTTCCTCGTGAGCAAGCTCACCGTGGACAAGAGC |
| | | AGGTGGCAGCAGGGGAACGTCTTCTCATGCTCCGTG |
| | | ATGCATGAGGCTCTGCACAACCACTACACGCAGAAG |
| | | AGCCTCTCCCTGTCTCCGGGTAAA |
| 184 | (28H1) VLCH1-Light | see Table 25 |
| | chain 2 (nucleotide | |
| | sequence) | |
| 198 | (28H1) VHCL-heavy | EVQLLESGGGLVQPGGSLRLSCAASGFTFSSHAMSWV |
| | chain hole | RQAPGKGLEWVSAIWASGEQYYADSVKGRFTISRDNS |
| | | KNTLYLQMNSLRAEDTAVYYCAKGWLGNFDYWGQG |
| | | TLVTVSSASVAAPSVFIFPPSDEQLKSGTASVVCLLNNF |
| | | YPREAKVQWKVDNALQSGNSQESVTEQDSKDSTYSLS |
| | | STLTLSKADYEKHKVYACEVTHQGLSSPVTKSFNRGE |
| | | CDKTHTCPPCPAPEAAGGPSVFLFPPKPKDTLMISRTPE |
| | | VTCVVVDVSHEDPEVKFNWYVDGVEVHNAKTKPREE |
| | | QYNSTYRVVSVLTVLHQDWLNGKEYKCKVSNKALGA |
| | | PIEKTISKAKGQPREPQVCTLPPSRDELTKNQVSLSCAV |
| | | KGFYPSDIAVEWESNGQPENNYKTTPPVLDSDGSFFLV |
| | | SKLTVDKSRWQQGNVFSCSVMHEALHNHYTQKSLSLS |
| | | PGK |
| 186 | (28H1) VLCH1-Light | see Table 25 |
| | chain 2 | |
| 199 | (8H9) VHCH1-heavy | CAGGTGCAATTGGTGCAGTCTGGGGCTGAGGTGAAG |
| | chain knob | AAGCCTGGGTCCTCGGTGAAGGTCTCCTGCAAGGCC |
| | (nucleotide sequence) | TCCGGAGGCACATTCAGCAGCTACGCTATAAGCTGG |
| | | GTGCGACAGGCCCCTGGACAAGGGCTCGAGTGGAT |
| | | GGGAGGGATCATCCCTATCTTTGGTACAGCAAACTA |
| | | CGCACAGAAGTTCCAGGGCAGGGTCACCATTACTGC |
| | | AGACAAATCCACGAGCACAGCCTACATGGAGCTGA |
| | | GCAGCCTGAGATCTGAGGACACCGCCGTGTATTACT |
| | | GTGCGAGAGAATACGGTTGGATGGACTACTGGGGCC |
| | | AAGGGACCACCGTGACCGTCTCCTCA |
| | | GCTAGCACCAAGGGCCCTAGCGTGTTCCCTCTGGCC |
| | | CCTAGCAGCAAGAGCACAAGTGGAGGAACAGCCGC |
| | | CCTGGGCTGCCTGGTCAAGGACTACTTCCCCGAGCC |
| | | CGTGACCGTGTCCTGGAATTCTGGCGCCCTGACAAG |
| | | CGGCGTGCACACATTTCCAGCCGTGCTGCAGAGCAG |
| | | CGGCCTGTACTCTCTGAGCAGCGTCGTGACCGTGCC |
| | | CTCTAGCTCTCTGGGCACCCAGACCTACATCTGCAA |
| | | CGTGAACCACAAGCCCAGCAACACCAAAGTGGACA |
| | | AGAAGGTGGAACCCAAGAGCTGCGACAAGACCCAC |
| | | ACCTGTCCCCCTTGCCCTGCCCCTGAAGCTGCTGGTG |
| | | GCCCTTCCGTGTTCCTGTTCCCCCCAAAGCCCAAGG |
| | | ACACCCTGATGATCAGCCGGACCCCCGAAGTGACCT |
| | | GCGTGGTGGTCGATGTGTCCCACGAGGACCCTGAAG |
| | | TGAAGTTCAATTGGTACGTGGACGGCGTGGAAGTGC |
| | | ACAATGCCAAGACCAAGCCGCGGGAGGAGCAGTAC |
| | | AACAGCACGTACCGTGTGGTCAGCGTCCTCACCGTC |
| | | CTGCACCAGGACTGGCTGAATGGCAAGGAGTACAA |
| | | GTGCAAGGTCTCCAACAAAGCCCTCGGCGCCCCCAT |
| | | CGAGAAAACCATCTCCAAAGCCAAAGGGCAGCCCC |
| | | GAGAACCACAGGTGTACACCCTGCCCCCATGCCGGG |
| | | ATGAGCTGACCAAGAACCAGGTCAGCCTGTGGTGCC |
| | | TGGTCAAAGGCTTCTATCCCAGCGACATCGCCGTGG |
| | | AGTGGGAGAGCAATGGGCAGCCGGAGAACAACTAC |
| | | AAGACCACGCCTCCCGTGCTGGACTCCGACGGCTCC |
| | | TTCTTCCTCTACAGCAAGCTCACCGTGGACAAGAGC |
| | | AGGTGGCAGCAGGGGAACGTCTTCTCATGCTCCGTG |
| | | ATGCATGAGGCTCTGCACAACCACTACACGCAGAAG |
| | | AGCCTCTCCCTGTCTCCGGGTAAA |
| 151 | (8H9) VLCL-Light | see Table 13 |
| | chain 1 (nucleotide | |
| | sequence) | |
| 200 | (8H9) VHCH1-heavy | QVQLVQSGAEVKKPGSSVKVSCKASGGTFSSYAISWV |
| | chain knob | RQAPGQGLEWMGGIIPIFGTANYAQKFQGRVTITADKS |
| | | TSTAYMELSSLRSEDTAVYYCAREYGWMDYWGQGTT |
| | | VTVSS |
| | | ASTKGPSVFPLAPSSKSTSGGTAALGCLVKDYFPEPVT |
| | | VSWNSGALTSGVHTFPAVLQSSGLYSLSSVVTVPSSSL |
| | | GTQTYICNVNHKPSNTKVDKKVEPKSCDKTHTCPPCP |
| | | APEAAGGPSVFLFPPKPKDTLMISRTPEVTCVVVDVSH |
| | | EDPEVKFNWYVDGVEVHNAKTKPREEQYNSTYRVVS |
| | | VLTVLHQDWLNGKEYKCKVSNKALGAPIEKTISKAKG |
| | | QPREPQVYTLPPCRDELTKNQVSLWCLVKGFYPSDIAV |
| | | EWESNGQPENNYKTTPPVLDSDGSFFLYSKLTVDKSR |
| | | WQQGNVFSCSVMHEALHNHYTQKSLSLSPGK |
| 153 | (8H9) VLCL-Light | see Table 13 |
| | chain 1 | |
| 201 | (49B4) VHCH1-heavy | AGGTGCAATTGGTGCAGTCTGGGGCTGAGGTGAAGA |
| | chain knob | AGCCTGGGTCCTCGGTGAAGGTCTCCTGCAAGGCCT |
| | (nucleotide sequence) | CCGGAGGCACATTCAGCAGCTACGCTATAAGCTGGG |
| | | TGCGACAGGCCCCTGGACAAGGGCTCGAGTGGATG |
| | | GGAGGGATCATCCCTATCTTTGGTACAGCAAACTAC |
| | | GCACAGAAGTTCCAGGGCAGGGTCACCATTACTGCA |
| | | GACAAATCCACGAGCACAGCCTACATGGAGCTGAG |
| | | CAGCCTGAGATCTGAGGACACCGCCGTGTATTACTG |
| | | TGCGAGAGAATACTACCGTGGTCCGTACGACTACTG |
| | | GGGCCAAGGGACCACCGTGACCGTCTCCTCA |
| | | GCTAGCACCAAGGGCCCTAGCGTGTTCCCTCTGGCC |
| | | CCTAGCAGCAAGAGCACAAGTGGAGGAACAGCCGC |
| | | CCTGGGCTGCCTGGTCAAGGACTACTTCCCCGAGCC |
| | | CGTGACCGTGTCCTGGAATTCTGGCGCCCTGACAAG |
| | | CGGCGTGCACACATTTCCAGCCGTGCTGCAGAGCAG |
| | | CGGCCTGTACTCTCTGAGCAGCGTCGTGACCGTGCC |
| | | CTCTAGCTCTCTGGGCACCCAGACCTACATCTGCAA |
| | | CGTGAACCACAAGCCCAGCAACACCAAAGTGGACA |
| | | AGAAGGTGGAACCCAAGAGCTGCGACAAGACCCAC |
| | | ACCTGTCCCCCTTGCCCTGCCCCTGAAGCTGCTGGTG |
| | | GCCCTTCCGTGTTCCTGTTCCCCCCAAAGCCCAAGG |
| | | ACACCCTGATGATCAGCCGGACCCCCGAAGTGACCT |
| | | GCGTGGTGGTCGATGTGTCCCACGAGGACCCTGAAG |
| | | TGAAGTTCAATTGGTACGTGGACGGCGTGGAAGTGC |
| | | ACAATGCCAAGACCAAGCCGCGGGAGGAGCAGTAC |
| | | AACAGCACGTACCGTGTGGTCAGCGTCCTCACCGTC |
| | | CTGCACCAGGACTGGCTGAATGGCAAGGAGTACAA |
| | | GTGCAAGGTCTCCAACAAAGCCCTCGGCGCCCCCAT |
| | | CGAGAAAACCATCTCCAAAGCCAAAGGGCAGCCCC |
| | | GAGAACCACAGGTGTACACCCTGCCCCCATGCCGGG |
| | | ATGAGCTGACCAAGAACCAGGTCAGCCTGTGGTGCC |
| | | TGGTCAAAGGCTTCTATCCCAGCGACATCGCCGTGG |
| | | AGTGGGAGAGCAATGGGCAGCCGGAGAACAACTAC |
| | | AAGACCACGCCTCCCGTGCTGGACTCCGACGGCTCC |
| | | TTCTTCCTCTACAGCAAGCTCACCGTGGACAAGAGC |
| | | AGGTGGCAGCAGGGGAACGTCTTCTCATGCTCCGTG |
| | | ATGCATGAGGCTCTGCACAACCACTACACGCAGAAG |
| | | AGCCTCTCCCTGTCTCCGGGTAAA |
| 155 | (49B4) VLCL-Light | see Table 13 |
| | chain 1 (nucleotide | |
| | sequence) | |
| 202 | (49B4) VHCH1-heavy | QVQLVQSGAEVKKPGSSVKVSCKASGGTFSSYAISWV |
| | chain knob | RQAPGQGLEWMGGIIPIFGTANYAQKFQGRVTITADKS |
| | | TSTAYMELSSLRSEDTAVYYCAREYYRGPYDYWGQG |
| | | TTVTVSS |
| | | ASTKGPSVFPLAPSSKSTSGGTAALGCLVKDYFPEPVT |
| | | VSWNSGALTSGVHTFPAVLQSSGLYSLSSVVTVPSSSL |
| | | GTQTYICNVNHKPSNTKVDKKVEPKSCDKTHTCPPCP |
| | | APEAAGGPSVFLFPPKPKDTLMISRTPEVTCVVVDVSH |
| | | EDPEVKFNWYVDGVEVHNAKTKPREEQYNSTYRVVS |
| | | VLTVLHQDWLNGKEYKCKVSNKALGAPIEKTISKAKG |
| | | QPREPQVYTLPPCRDELTKNQVSLWCLVKGFYPSDIAV |
| | | EWESNGQPENNYKTTPPVLDSDGSFFLYSKLTVDKSR |
| | | WQQGNVFSCSVMHEALHNHYTQKSLSLSPGK |
| 157 | (49B4) VLCL-Light | see Table 13 |
| | chain 1 | |
| 203 | (1G4) VHCH1-heavy | CAGGTGCAATTGGTGCAGTCTGGGGCTGAGGTGAAG |
| | chain knob | AAGCCTGGGTCCTCGGTGAAGGTCTCCTGCAAGGCC |
| | (nucleotide sequence) | TCCGGAGGCACATTCAGCAGCTACGCTATAAGCTGG |
| | | GTGCGACAGGCCCCTGGACAAGGGCTCGAGTGGAT |
| | | GGGAGGGATCATCCCTATCTTTGGTACAGCAAACTA |
| | | CGCACAGAAGTTCCAGGGCAGGGTCACCATTACTGC |
| | | AGACAAATCCACGAGCACAGCCTACATGGAGCTGA |
| | | GCAGCCTGAGATCTGAGGACACCGCCGTGTATTACT |
| | | GTGCGAGAGAATACGGTTCTATGGACTACTGGGGCC |
| | | AAGGGACCACCGTGACCGTCTCCTCA |
| | | GCTAGCACCAAGGGCCCTAGCGTGTTCCCTCTGGCC |
| | | CCTAGCAGCAAGAGCACAAGTGGAGGAACAGCCGC |
| | | CCTGGGCTGCCTGGTCAAGGACTACTTCCCCGAGCC |
| | | CGTGACCGTGTCCTGGAATTCTGGCGCCCTGACAAG |
| | | CGGCGTGCACACATTTCCAGCCGTGCTGCAGAGCAG |
| | | CGGCCTGTACTCTCTGAGCAGCGTCGTGACCGTGCC |
| | | CTCTAGCTCTCTGGGCACCCAGACCTACATCTGCAA |
| | | CGTGAACCACAAGCCCAGCAACACCAAAGTGGACA |
| | | AGAAGGTGGAACCCAAGAGCTGCGACAAGACCCAC |
| | | ACCTGTCCCCCTTGCCCTGCCCCTGAAGCTGCTGGTG |
| | | GCCCTTCCGTGTTCCTGTTCCCCCCAAAGCCCAAGG |
| | | ACACCCTGATGATCAGCCGGACCCCCGAAGTGACCT |
| | | GCGTGGTGGTCGATGTGTCCCACGAGGACCCTGAAG |
| | | TGAAGTTCAATTGGTACGTGGACGGCGTGGAAGTGC |
| | | ACAATGCCAAGACCAAGCCGCGGGAGGAGCAGTAC |
| | | AACAGCACGTACCGTGTGGTCAGCGTCCTCACCGTC |
| | | CTGCACCAGGACTGGCTGAATGGCAAGGAGTACAA |
| | | GTGCAAGGTCTCCAACAAAGCCCTCGGCGCCCCCAT |
| | | CGAGAAAACCATCTCCAAAGCCAAAGGGCAGCCCC |
| | | GAGAACCACAGGTGTACACCCTGCCCCCATGCCGGG |
| | | ATGAGCTGACCAAGAACCAGGTCAGCCTGTGGTGCC |
| | | TGGTCAAAGGCTTCTATCCCAGCGACATCGCCGTGG |
| | | AGTGGGAGAGCAATGGGCAGCCGGAGAACAACTAC |
| | | AAGACCACGCCTCCCGTGCTGGACTCCGACGGCTCC |
| | | TTCTTCCTCTACAGCAAGCTCACCGTGGACAAGAGC |
| | | AGGTGGCAGCAGGGGAACGTCTTCTCATGCTCCGTG |
| | | ATGCATGAGGCTCTGCACAACCACTACACGCAGAAG |
| | | AGCCTCTCCCTGTCTCCGGGTAAA |
| 159 | (1G4) VLCL-Light | see Table 13 |
| | chain 1 (nucleotide | |
| | sequence) | |
| 204 | (1G4) VHCH1-heavy | QVQLVQSGAEVKKPGSSVKVSCKASGGTFSSYAISWV |
| | chain knob | RQAPGQGLEWMGGIIPIFGTANYAQKFQGRVTITADKS |
| | | TSTAYMELSSLRSEDTAVYYCAREYGSMDYWGQGTT |
| | | VTVSS |
| | | ASTKGPSVFPLAPSSKSTSGGTAALGCLVKDYFPEPVT |
| | | VSWNSGALTSGVHTFPAVLQSSGLYSLSSVVTVPSSSL |
| | | GTQTYICNVNHKPSNTKVDKKVEPKSCDKTHTCPPCP |
| | | APEAAGGPSVFLFPPKPKDTLMISRTPEVTCVVVDVSH |
| | | EDPEVKFNWYVDGVEVHNAKTKPREEQYNSTYRVVS |
| | | VLTVLHQDWLNGKEYKCKVSNKALGAPIEKTISKAKG |
| | | QPREPQVYTLPPCRDELTKNQVSLWCLVKGFYPSDIAV |
| | | EWESNGQPENNYKTTPPVLDSDGSFFLYSKLTVDKSR |
| | | WQQGNVFSCSVMHEALHNHYTQKSLSLSPGK |
| 161 | (1G4) VLCL-Light | see Table 13 |
| | chain 1 | |
| 205 | (20B7) VHCH1-heavy | CAGGTGCAATTGGTGCAGTCTGGGGCTGAGGTGAAG |
| | chain knob | AAGCCTGGGTCCTCGGTGAAGGTCTCCTGCAAGGCC |
| | (nucleotide sequence) | TCCGGAGGCACATTCAGCAGCTACGCTATAAGCTGG |
| | | GTGCGACAGGCCCCTGGACAAGGGCTCGAGTGGAT |
| | | GGGAGGGATCATCCCTATCTTTGGTACAGCAAACTA |
| | | CGCACAGAAGTTCCAGGGCAGGGTCACCATTACTGC |
| | | AGACAAATCCACGAGCACAGCCTACATGGAGCTGA |
| | | GCAGCCTGAGATCTGAGGACACCGCCGTGTATTACT |
| | | GTGCGAGAGTTAACTACCCGTACTCTTACTGGGGTG |
| | | ACTTCGACTACTGGGGCCAAGGGACCACCGTGACCG |
| | | TCTCCTCA |
| | | GCTAGCACCAAGGGCCCTAGCGTGTTCCCTCTGGCC |
| | | CCTAGCAGCAAGAGCACAAGTGGAGGAACAGCCGC |
| | | CCTGGGCTGCCTGGTCAAGGACTACTTCCCCGAGCC |
| | | CGTGACCGTGTCCTGGAATTCTGGCGCCCTGACAAG |
| | | CGGCGTGCACACATTTCCAGCCGTGCTGCAGAGCAG |
| | | CGGCCTGTACTCTCTGAGCAGCGTCGTGACCGTGCC |
| | | CTCTAGCTCTCTGGGCACCCAGACCTACATCTGCAA |
| | | CGTGAACCACAAGCCCAGCAACACCAAAGTGGACA |
| | | AGAAGGTGGAACCCAAGAGCTGCGACAAGACCCAC |
| | | ACCTGTCCCCCTTGCCCTGCCCCTGAAGCTGCTGGTG |
| | | GCCCTTCCGTGTTCCTGTTCCCCCCAAAGCCCAAGG |
| | | ACACCCTGATGATCAGCCGGACCCCCGAAGTGACCT |
| | | GCGTGGTGGTCGATGTGTCCCACGAGGACCCTGAAG |
| | | TGAAGTTCAATTGGTACGTGGACGGCGTGGAAGTGC |
| | | ACAATGCCAAGACCAAGCCGCGGGAGGAGCAGTAC |
| | | AACAGCACGTACCGTGTGGTCAGCGTCCTCACCGTC |
| | | CTGCACCAGGACTGGCTGAATGGCAAGGAGTACAA |
| | | GTGCAAGGTCTCCAACAAAGCCCTCGGCGCCCCCAT |
| | | CGAGAAAACCATCTCCAAAGCCAAAGGGCAGCCCC |
| | | GAGAACCACAGGTGTACACCCTGCCCCCATGCCGGG |
| | | ATGAGCTGACCAAGAACCAGGTCAGCCTGTGGTGCC |
| | | TGGTCAAAGGCTTCTATCCCAGCGACATCGCCGTGG |
| | | AGTGGGAGAGCAATGGGCAGCCGGAGAACAACTAC |
| | | AAGACCACGCCTCCCGTGCTGGACTCCGACGGCTCC |
| | | TTCTTCCTCTACAGCAAGCTCACCGTGGACAAGAGC |
| | | AGGTGGCAGCAGGGGAACGTCTTCTCATGCTCCGTG |
| | | ATGCATGAGGCTCTGCACAACCACTACACGCAGAAG |
| | | AGCCTCTCCCTGTCTCCGGGTAAA |
| 163 | (20B7) VLCL-Light | see Table 13 |
| | chain 1 (nucleotide | |
| | sequence) | |
| 206 | (20B7) VHCH1-heavy | QVQLVQSGAEVKKPGSSVKVSCKASGGTFSSYAISWV |
| | chain knob | RQAPGQGLEWMGGIIPIFGTANYAQKFQGRVTITADKS |
| | | TSTAYMELSSLRSEDTAVYYCARVNYPYSYWGDFDY |
| | | WGQGTTVTVSS |
| | | ASTKGPSVFPLAPSSKSTSGGTAALGCLVKDYFPEPVT |
| | | VSWNSGALTSGVHTFPAVLQSSGLYSLSSVVTVPSSSL |
| | | GTQTYICNVNHKPSNTKVDKKVEPKSCDKTHTCPPCP |
| | | APEAAGGPSVFLFPPKPKDTLMISRTPEVTCVVVDVSH |
| | | EDPEVKFNWYVDGVEVHNAKTKPREEQYNSTYRVVS |
| | | VLTVLHQDWLNGKEYKCKVSNKALGAPIEKTISKAKG |
| | | QPREPQVYTLPPCRDELTKNQVSLWCLVKGFYPSDIAV |
| | | EWESNGQPENNYKTTPPVLDSDGSFFLYSKLTVDKSR |
| | | WQQGNVFSCSVMHEALHNHYTQKSLSLSPGK |
| 165 | (20B7) VLCL-Light | see Table 13 |
| | chain 1 | |
| 207 | (CLC-563) VHCH1- | GAGGTGCAATTGTTGGAGTCTGGGGGAGGCTTGGTA |
| | heavy chain knob | CAGCCTGGGGGGTCCCTGAGACTCTCCTGTGCAGCC |
| | (nucleotide sequence) | TCCGGATTCACCTTTAGCAGTTATGCCATGAGCTGG |
| | | GTCCGCCAGGCTCCAGGGAAGGGGCTGGAGTGGGT |
| | | CTCAGCTATTAGTGGTAGTGGTGGTAGCACATACTA |
| | | CGCAGACTCCGTGAAGGGCCGGTTCACCATCTCCAG |
| | | AGACAATTCCAAGAACACGCTGTATCTGCAGATGAA |
| | | CAGCCTGAGAGCCGAGGACACGGCCGTATATTACTG |
| | | TGCGCTTGACGTTGGTGCTTTCGACTACTGGGGCCA |
| | | AGGAGCCCTGGTCACCGTCTCGAGT |
| | | GCTAGCACCAAGGGCCCTAGCGTGTTCCCTCTGGCC |
| | | CCTAGCAGCAAGAGCACAAGTGGAGGAACAGCCGC |
| | | CCTGGGCTGCCTGGTCAAGGACTACTTCCCCGAGCC |
| | | CGTGACCGTGTCCTGGAATTCTGGCGCCCTGACAAG |
| | | CGGCGTGCACACATTTCCAGCCGTGCTGCAGAGCAG |
| | | CGGCCTGTACTCTCTGAGCAGCGTCGTGACCGTGCC |
| | | CTCTAGCTCTCTGGGCACCCAGACCTACATCTGCAA |
| | | CGTGAACCACAAGCCCAGCAACACCAAAGTGGACA |
| | | AGAAGGTGGAACCCAAGAGCTGCGACAAGACCCAC |
| | | ACCTGTCCCCCTTGCCCTGCCCCTGAAGCTGCTGGTG |
| | | GCCCTTCCGTGTTCCTGTTCCCCCCAAAGCCCAAGG |
| | | ACACCCTGATGATCAGCCGGACCCCCGAAGTGACCT |
| | | GCGTGGTGGTCGATGTGTCCCACGAGGACCCTGAAG |
| | | TGAAGTTCAATTGGTACGTGGACGGCGTGGAAGTGC |
| | | ACAATGCCAAGACCAAGCCGCGGGAGGAGCAGTAC |
| | | AACAGCACGTACCGTGTGGTCAGCGTCCTCACCGTC |
| | | CTGCACCAGGACTGGCTGAATGGCAAGGAGTACAA |
| | | GTGCAAGGTCTCCAACAAAGCCCTCGGCGCCCCCAT |
| | | CGAGAAAACCATCTCCAAAGCCAAAGGGCAGCCCC |
| | | GAGAACCACAGGTGTACACCCTGCCCCCATGCCGGG |
| | | ATGAGCTGACCAAGAACCAGGTCAGCCTGTGGTGCC |
| | | TGGTCAAAGGCTTCTATCCCAGCGACATCGCCGTGG |
| | | AGTGGGAGAGCAATGGGCAGCCGGAGAACAACTAC |
| | | AAGACCACGCCTCCCGTGCTGGACTCCGACGGCTCC |
| | | TTCTTCCTCTACAGCAAGCTCACCGTGGACAAGAGC |
| | | AGGTGGCAGCAGGGGAACGTCTTCTCATGCTCCGTG |
| | | ATGCATGAGGCTCTGCACAACCACTACACGCAGAAG |
| | | AGCCTCTCCCTGTCTCCGGGTAAA |
| 167 | (CLC-563) VLCL-Light | see Table 13 |
| | chain 1 (nucleotide | |
| | sequence) | |
| 208 | (CLC-563) VHCH1- | EVQLLESGGGLVQPGGSLRLSCAASGFTFSSYAMSWV |
| | heavy chain knob | RQAPGKGLEWVSAISGSGGSTYYADSVKGRFTISRDNS |
| | | KNTLYLQMNSLRAEDTAVYYCALDVGAFDYWGQGA |
| | | LVTVSS |
| | | ASTKGPSVFPLAPSSKSTSGGTAALGCLVKDYFPEPVT |
| | | VSWNSGALTSGVHTFPAVLQSSGLYSLSSVVTVPSSSL |
| | | GTQTYICNVNHKPSNTKVDKKVEPKSCDKTHTCPPCP |
| | | APEAAGGPSVFLFPPKPKDTLMISRTPEVTCVVVDVSH |
| | | EDPEVKFNWYVDGVEVHNAKTKPREEQYNSTYRVVS |
| | | VLTVLHQDWLNGKEYKCKVSNKALGAPIEKTISKAKG |
| | | QPREPQVYTLPPCRDELTKNQVSLWCLVKGFYPSDIAV |
| | | EWESNGQPENNYKTTPPVLDSDGSFFLYSKLTVDKSR |
| | | WQQGNVFSCSVMHEALHNHYTQKSLSLSPGK |
| 169 | (CLC-563) VLCL-Light | see Table 13 |
| | chain 1 | |
| 209 | (CLC-564) VHCH1- | GAGGTGCAATTGTTGGAGTCTGGGGGAGGCTTGGTA |
| | heavy chain knob | CAGCCTGGGGGGTCCCTGAGACTCTCCTGTGCAGCC |
| | (nucleotide sequence) | TCCGGATTCACCTTTAGCAGTTATGCCATGAGCTGG |
| | | GTCCGCCAGGCTCCAGGGAAGGGGCTGGAGTGGGT |
| | | CTCAGCTATTAGTGGTAGTGGTGGTAGCACATACTA |
| | | CGCAGACTCCGTGAAGGGCCGGTTCACCATCTCCAG |
| | | AGACAATTCCAAGAACACGCTGTATCTGCAGATGAA |
| | | CAGCCTGAGAGCCGAGGACACGGCCGTATATTACTG |
| | | TGCGTTCGACGTTGGTCCGTTCGACTACTGGGGCCA |
| | | AGGAACCCTGGTCACCGTCTCGAGT |
| | | GCTAGCACCAAGGGCCCTAGCGTGTTCCCTCTGGCC |
| | | CCTAGCAGCAAGAGCACAAGTGGAGGAACAGCCGC |
| | | CCTGGGCTGCCTGGTCAAGGACTACTTCCCCGAGCC |
| | | CGTGACCGTGTCCTGGAATTCTGGCGCCCTGACAAG |
| | | CGGCGTGCACACATTTCCAGCCGTGCTGCAGAGCAG |
| | | CGGCCTGTACTCTCTGAGCAGCGTCGTGACCGTGCC |
| | | CTCTAGCTCTCTGGGCACCCAGACCTACATCTGCAA |
| | | CGTGAACCACAAGCCCAGCAACACCAAAGTGGACA |
| | | AGAAGGTGGAACCCAAGAGCTGCGACAAGACCCAC |
| | | ACCTGTCCCCCTTGCCCTGCCCCTGAAGCTGCTGGTG |
| | | GCCCTTCCGTGTTCCTGTTCCCCCCAAAGCCCAAGG |
| | | ACACCCTGATGATCAGCCGGACCCCCGAAGTGACCT |
| | | GCGTGGTGGTCGATGTGTCCCACGAGGACCCTGAAG |
| | | TGAAGTTCAATTGGTACGTGGACGGCGTGGAAGTGC |
| | | ACAATGCCAAGACCAAGCCGCGGGAGGAGCAGTAC |
| | | AACAGCACGTACCGTGTGGTCAGCGTCCTCACCGTC |
| | | CTGCACCAGGACTGGCTGAATGGCAAGGAGTACAA |
| | | GTGCAAGGTCTCCAACAAAGCCCTCGGCGCCCCCAT |
| | | CGAGAAAACCATCTCCAAAGCCAAAGGGCAGCCCC |
| | | GAGAACCACAGGTGTACACCCTGCCCCCATGCCGGG |
| | | ATGAGCTGACCAAGAACCAGGTCAGCCTGTGGTGCC |
| | | TGGTCAAAGGCTTCTATCCCAGCGACATCGCCGTGG |
| | | AGTGGGAGAGCAATGGGCAGCCGGAGAACAACTAC |
| | | AAGACCACGCCTCCCGTGCTGGACTCCGACGGCTCC |
| | | TTCTTCCTCTACAGCAAGCTCACCGTGGACAAGAGC |
| | | AGGTGGCAGCAGGGGAACGTCTTCTCATGCTCCGTG |
| | | ATGCATGAGGCTCTGCACAACCACTACACGCAGAAG |
| | | AGCCTCTCCCTGTCTCCGGGTAAA |
| 171 | (CLC-564) VLCL-Light | see Table 13 |
| | chain 1 (nucleotide | |
| | sequence) | |
| 210 | (CLC-564) VHCH1- | EVQLLESGGGLVQPGGSLRLSCAASGFTFSSYAMSWV |
| | heavy chain knob | RQAPGKGLEWVSAISGSGGSTYYADSVKGRFTISRDNS |
| | | KNTLYLQMNSLRAEDTAVYYCAFDVGPFDYWGQGTL |
| | | VTVSS |
| | | ASTKGPSVFPLAPSSKSTSGGTAALGCLVKDYFPEPVT |
| | | VSWNSGALTSGVHTFPAVLQSSGLYSLSSVVTVPSSSL |
| | | GTQTYICNVNHKPSNTKVDKKVEPKSCDKTHTCPPCP |
| | | APEAAGGPSVFLFPPKPKDTLMISRTPEVTCVVVDVSH |
| | | EDPEVKFNWYVDGVEVHNAKTKPREEQYNSTYRVVS |
| | | VLTVLHQDWLNGKEYKCKVSNKALGAPIEKTISKAKG |
| | | QPREPQVYTLPPCRDELTKNQVSLWCLVKGFYPSDIAV |
| | | EWESNGQPENNYKTTPPVLDSDGSFFLYSKLTVDKSR |
| | | WQQGNVFSCSVMHEALHNHYTQKSLSLSPGK |
| 173 | (CLC-564) VLCL-Light | see Table 13 |
| | chain 1 | |

[0738] All genes were transiently expressed under control of a chimeric MPSV promoter consisting of the MPSV core promoter combined with the CMV promoter enhancer fragment. The expression vector also contains the oriP region for episomal replication in EBNA (Epstein Barr Virus Nuclear Antigen) containing host cells.

[0739] The bispecific anti-Ox40, anti-FAP constructs were produced by co-transfecting HEK293-EBNA cells with the mammalian expression vectors using polyethylenimine. The cells were transfected with the corresponding expression vectors in a 1:1:1:1 ratio (“vector heavy chain hole”:“vector heavy chain knob”:“vector light chain1”:“vector light chain2”).

[0740] For production in 500 mL shake flasks, 400 million HEK293 EBNA cells were seeded 24 hours before transfection. For transfection cells were centrifuged for 5 minutes by 210×g, and supernatant was replaced by pre-warmed CD CHO medium. Expression vectors were mixed in 20 mL CD CHO medium to a final amount of 200 μg DNA. After addition of 540 μL PEI, the solution was vortexed for 15 seconds and incubated for 10 minutes at room temperature. Afterwards, cells were mixed with the DNA/PEI solution, transferred to a 500 mL shake flask and incubated for 3 hours at 37° C. in an incubator with a 5% CO₂ atmosphere. After the incubation, 160 mL F17 medium was added and cells were cultured for 24 hours. One day after transfection 1 mM valproic acid and 7% Feed were added. After culturing for 7 days, the cell supernatant was collected by centrifugation for 15 minutes at 210×g. The solution was sterile filtered (0.22 μm filter), supplemented with sodium azide to a final concentration of 0.01% (w/v), and kept at 4° C.

[0741] Purification of the bispecific antigen binding molecules from cell culture supernatants was carried out by affinity chromatography using Protein A as described above for purification of antigen-Fc fusions and antibodies.

[0742] The protein was concentrated and filtered prior to loading on a HiLoad Superdex 200 column (GE Healthcare) equilibrated with 20 mM Histidine, 140 mM NaCl solution of pH 6.0.

[0743] The protein concentration of purified bispecific constructs was determined by measuring the OD at 280 nm, using the molar extinction coefficient calculated on the basis of the amino acid sequence. Purity and molecular weight of the bispecific constructs were analyzed by CE-SDS in the presence and absence of a reducing agent (Invitrogen, USA) using a LabChipGXII (Caliper). The aggregate content of bispecific constructs was analyzed using a TSKgel G3000 SW XL analytical size-exclusion column (Tosoh) equilibrated in a 25 mM K₂HPO₄, 125 mM NaCl, 200 mM L-Arginine Monohydrocloride, 0.02% (w/v) NaN₃, pH 6.7 running buffer at 25° C.

[0744] Table 28 summarizes the biochemical analysis of bispecific, monovalent anti-Ox40/anti-FAP IgG1 P329G LALA kih antigen binding molecules.

TABLE 28
Biochemical analysis of bispecific monovalent anti-Ox40/anti-FAP
IgG1 P329G LALA kih antigen binding molecules

| | Yield | Monomer | CE-SDS | | CE-SDS | |
|---|---|---|---|---|---|---|
| Clone | [mg/l] | [%] | (non red) | | (red) | |
| 8H9/FAP P329GLALA IgG1 | 16.5 | 100 | 92.1% | (164 kDa) | 67.7% | (63.6 kDa) |
| 1 + 1 | | | 1.9% | (145 kDa) | 13.3% | (28.5 kDa) |
| | | | 3.6% | (120.1 kDa) | 16.5% | (25.7 kDa) |
| 1G4/FAP P329GLALA IgG1 | 12.5 | 98.5 | 85.2% | (157 kDa) | 69.5% | (64.2 kDa) |
| 1 + 1 | | | 7.4% | (151 kDa) | 13.1% | (28.8 kDa) |
| | | | 2.8% | (139.5 kDa) | 16.7% | (26.2 kDa) |
| 49B4/FAP P329GLALA IgG1 | 2.3 | 97.9 | 80% | (153 kDa) | 70.4% | (63.5 kDa) |
| 1 + 1 | | | 11.9% | (141 kDa) | 14.7% | (28 kDa) |
| | | | 4.3% | (120 kDa) | 13.7% | (25 kDa) |
| 20B7/FAP P329GLALA IgG1 | 22 | 100 | 97.5% | (166 kDa) | 82.7% | (56.2 kDa) |
| 1 + 1 | | | 1.3% | (149 kDa) | 8.2% | (27.2 kDa) |
| | | | | | 8.1% | (24.3 kDa) |

### 4.3 Characterization of Bispecific, Bivalent Constructs Targeting Ox40 and FAP

### 4.3.1 Surface Plasmon Resonance (Simultaneous Binding)

[0745] The capacity of binding simultaneously human Ox40 Fc(kih) and human FAP was assessed by surface plasmon resonance (SPR). All SPR experiments were performed on a Biacore T200 at 25° C. with HBS-EP as running buffer (0.01 M HEPES pH 7.4, 0.15 M NaCl, 3 mM EDTA, 0.005% Surfactant P20, Biacore, Freiburg/Germany). Biotinylated human Ox40 Fc(kih) was directly coupled to a flow cell of a streptavidin (SA) sensor chip Immobilization levels up to 1000 resonance units (RU) were used.

[0746] The bispecific constructs targeting Ox40 and FAP were passed at a concentration range of 250 nM with a flow of 30 μL/minute through the flow cells over 90 seconds and dissociation was set to zero sec. Human FAP was injected as second analyte with a flow of 30 μL/minute through the flow cells over 90 seconds at a concentration of 250 nM (FIG. 12C). The dissociation was monitored for 120 sec. Bulk refractive index differences were corrected for by subtracting the response obtained in a reference flow cell, where no protein was immobilized.

[0747] As can be seen in the graphs of FIGS. 13A, 13B, 13C, and 13D for the 2+2 constructs and in FIGS. 13E, 13F, 13G, and 13H, all bispecific constructs could bind simultaneously human Ox40 and human FAP.

### 4.3.2 Binding on Cells

### 4.3.2.1 Binding to Naïve Versus Activated Human PBMCs of FAP-Targeted Anti-Ox40 Antibodies

[0748] Human PBMC were isolated by ficoll density gradient centrifugation as described in Example 2.1.2. PBMCs were used directly after isolation (binding on resting human PBMCs) or they were stimulated to receive a strong human Ox40 expression on the cell surface of T cells (binding on activated human PBMCs). Therefore naïve PBMCs were cultured for four to seven days in T cell medium supplied with 200 U/mL Proleukin and 2 ug/mL PHA-L in 6-well tissue culture plate and then 1 day on pre-coated 6-well tissue culture plates [10 ug/mL anti-human CD3 (clone OKT3) and 2 ug/mL anti-human CD28 (clone CD28.2)] in T cell medium supplied with 200 U/mL Proleukin at 37° C. and 5% CO₂.

[0749] For detection of Ox40 naïve human PBMC and activated human PBMC were mixed. To enable distinction of naïve from activated human PBMC naïve cells were labeled prior to the binding assay using the eFluor670 cell proliferation dye (eBioscience, Cat.-No. 65-0840-85). A 1 to 1 mixture of 1×10⁵ naïve, eFluor670 labeled human PBMC and unlabeled activated human PBMC were then added to each well of a round-bottom suspension cell 96-well plates (greiner bio-one, cellstar, Cat. No. 650185) and the binding assay was performed as described in Example 2.1.2. A 1 to 1 mixture of 1×105 naïve, eFluor670 labeled human PBMC and unlabeled activated human PBMC were then added to each well of a round-bottom suspension cell 96-well plates (greiner bio-one, cellstar, Cat. No. 650185) and binding assay was performed as described in section 2.1.2.

[0750] Primary antibodies were titrated anti-Ox40 antibody constructs, incubated for 120 minutes at 4° C. Secondary antibody solution was a mixture of fluorescently labeled anti-human CD4 (clone RPA-T4, mouse IgG1 k, BioLegend, Cat.-No. 300532), anti-human CD8 (clone RPa-T8, mouse IgG1k, BioLegend, Cat.-No. 3010441) and Fluorescein isothiocyanate (FITC)-conjugated AffiniPure anti-human IgG Fcγ-fragment-specific goat IgG F(ab′)₂ fragment (Jackson ImmunoResearch, Cat.-No. 109-096-098), incubated for 30 minutes at 4° C. in the dark. Plates were finally resuspended in 80 μL/well FACS-buffer containing 0.2 μg/mL DAPI (Santa Cruz Biotec, Cat. No. Sc-3598) and acquired the same day using 5-laser LSR-Fortessa (BD Bioscience with DIVA software).

[0751] As shown in FIGS. 14A and 14B, no antigen binding molecule specific for Ox40 bound to resting human CD4+ T-cells or CD8+ T-cells. In contrast, all antigen binding molecules bound to activated CD8+ or CD4+ T-cells. Binding to CD4+ T-cells was much stronger than that to CD8+ T cells similar to what was described already in Example 1.4.1.2. As shown in FIGS. 14A and 14B, bivalent FAP targeted Ox40 construct showed similar binding characteristics to Ox40 positive and negative cells as respective clones in a conventional IgG antibody format, whereas monovalent antibodies had a clearly reduced capacity to bind to Ox40 positive cells due to the loss of avidity.

### 4.3.2.2 Binding to Human FAP-Expressing Tumor Cells

[0752] The binding to cell surface FAP was tested using human fibroblast activating protein (huFAP) expressing cells NIH/3T3-huFAP clone 39 or WM266-4 cells (ATCC CRL-1676). NIH/3T3-huFAP clone 39 was generated by the transfection of the mouse embryonic fibroblast NIH/3T3 cell line (ATCC CRL-1658) with the expression vector pETR4921 to express huFAP under 1.5 μg/mL Puromycin selection. In some assays WM266-4 cells were pre-labeled with PKH-26 Red Fluorescence Cell linker Kit (Sigma, Cat.-No. PKH26GL) as described in Example 2.3.2 to allow separation of these tumor cells from other cells present (e.g. human PBMC).

[0753] 0.5×10⁵ NIH/3T3-huFAP clone 39 or WM266-4 cells were then added to each well of a round-bottom suspension cell 96-well plates (greiner bio-one, cellstar, Cat. No. 650185) and the binding assay was performed in a similar manner as described in Example 2.3.2. Plates were centrifuged 4 minutes, 400×g at 4° C. and supernatants were flicked off. Cells were washed once with 200 μL DPBS and pellets were resuspended by a short and gentle vortex. All samples were resuspended in 50 μL/well of 4° C. cold FACS buffer containing the bispecific antigen binding molecules (primary antibody) at the indicated range of concentrations (titrated) and incubated for 120 minutes at 4° C. Afterwards the cells were washed four times with 200 μL 4° C. FACS buffer and resuspended by a short vortex. Cells were further stained with 25 μL/well of 4° C. cold secondary antibody solution containing Fluorescein isothiocyanate (FITC)-conjugated AffiniPure anti-human IgG Fcγ-fragment-specific goat IgG F(ab′)₂ fragment (Jackson ImmunoResearch, Cat. No. 109-096-098) and incubated for 30 minutes at 4° C. in the dark. Plates were finally resuspended in 80 μL/well FACS-buffer containing 0.2 μg/mL DAPI (Santa Cruz Biotec, Cat. No. Sc-3598) and acquired the same day using 5-laser LSR-Fortessa (BD Bioscience with DIVA software).

[0754] As shown in FIG. 15A, the FAP-targeted mono- and bivalent anti-Ox40 antigen binding molecules but not the same clones in the huIgG1 P329GLALA format efficiently bound to human FAP-expressing target cells. Therefore only FAP-targeted mono- and bivalent anti-Ox40 antigen binding molecules show direct tumor-targeting properties. The bivalent construct (filled square) showed stronger binding to FAP than the monovalent constructs explained by a gain of avidity in the bivalent relative to the monovalent format. This was more prominent in the high FAP expressing NIH/3T3-huFAP clone 39 cells (left graph) than in the lower FAP expressing WM266-4 cells. A lower density of surface FAP on WM266-4 cells might not provide the close proximity of FAP molecules to always allow bivalent binding of the anti-OX40 constructs. EC₅₀ values of binding to activated human CD4 T cells and FAP positive tumor cells are summarized in Table 29.

TABLE 29
EC₅₀ values for binding of selected aOx40 binder (clone 8H9, 1G4)
in a FAP targeted mono or bivalent format to cell surface human FAP
and human Ox40

| | | FAP+ cell | OX40+ cell |
|---|---|---|---|
| Clone | Format | EC₅₀ [nM] | EC₅₀ [nM] |
| 8H9 | hu IgG1 | n.a. | 0.59 |
| (WM266-4) | FAP 1 + 1 | 5.99 | 8.20 |
| | FAP 2 + 2 | 2.88 | 0.93 |
| 1G4 | hu IgG1 | n.a. | n.a. |
| (NIH/3T3 huFAP clone | FAP 1 + 1 | 3.55 | 49.07 |
| 39) | FAP 2 + 2 | 0.77 | 9.37 |

### 4.4 Generation of Bispecific Tetravalent Antigen Binding Molecules Targeting Ox40 and Fibroblast Activation Protein (FAP) (4+1 Format)

[0755] Bispecific agonistic Ox40 antibodies with tetravalent binding for Ox40 and monovalent binding for FAP were prepared by applying the knob-into-hole technology to allow the assembling of two different heavy chains.

[0756] In this example, the first heavy chain (HC 1) was comprised of two Fab units (VHCH1_VHCH1) of the anti-OX40 binder 49B4 followed by Fc knob chain fused by a (G4S) linker to a VH domain of the anti-FAP binder 28H1 or 4B9. The second heavy chain (HC 2) of the construct was comprised of two Fab units (VHCH1_VHCH1) of the anti-OX40 binder 49B4 followed Fc hole chain fused by a (G4S) linker to a VL domain of the anti-FAP binder 28H1 or 4B9.

[0757] The generation and preparation of the FAP binders is described in WO 2012/020006 A2, which is incorporated herein by reference.

[0758] The Pro329Gly, Leu234Ala and Leu235Ala mutations were introduced in the constant region of the heavy chains to abrogate binding to Fc gamma receptors according to the method described in International Patent Appl. Publ. No. WO 2012/130831 A1. The heavy chain fusion proteins were co-expressed with the light chain of the anti-OX40 binder 49B4 (CLVL). The resulting bispecific, tetravalent construct is depicted in FIG. 16A and the nucleotide and amino acid sequences can be found in Table 30.

[0759] In addition, an “untargeted” 4+1 construct was prepared, wherein the VH and VL domain of the anti-FAP binder were replaced by a germline control, termed DP47, not binding to the antigen.

TABLE 30
cDNA and amino acid sequences of mature bispecific tetravalent
anti-Ox40/monovalent anti-FAP huIgG1 P329GLALA kih antibodies
(4 + 1 format) and untargeted (DP47) 4 + 1 construct

| SEQ ID | | |
|---|---|---|
| NO: | Description | Sequence |
| 155 | (49B4) VLCL-light | see Table 13 |
| | chain | |
| | (nucleotide sequence) | |
| 211 | HC 1 | CAGGTGCAATTGGTGCAGTCTGGGGCTGAGGTGAAG |
| | (49B4) | AAGCCTGGGTCCTCGGTGAAGGTCTCCTGCAAGGCC |
| | VHCH1_VHCH1 Fc | TCCGGAGGCACATTCAGCAGCTACGCTATAAGCTGG |
| | knob VH (4B9) | GTGCGACAGGCCCCTGGACAAGGGCTCGAGTGGAT |
| | (nucleotide sequence) | GGGAGGGATCATCCCTATCTTTGGTACAGCAAACTA |
| | | CGCACAGAAGTTCCAGGGCAGGGTCACCATTACTGC |
| | | AGACAAATCCACGAGCACAGCCTACATGGAGCTGA |
| | | GCAGCCTGAGATCTGAGGACACCGCCGTGTATTACT |
| | | GTGCGAGAGAATACTACCGTGGTCCGTACGACTACT |
| | | GGGGCCAAGGGACCACCGTGACCGTCTCCTCAGCTA |
| | | GCACAAAGGGACCTAGCGTGTTCCCCCTGGCCCCCA |
| | | GCAGCAAGTCTACATCTGGCGGAACAGCCGCCCTGG |
| | | GCTGCCTCGTGAAGGACTACTTTCCCGAGCCCGTGA |
| | | CCGTGTCCTGGAACTCTGGCGCTCTGACAAGCGGCG |
| | | TGCACACCTTTCCAGCCGTGCTGCAGAGCAGCGGCC |
| | | TGTACTCTCTGAGCAGCGTCGTGACAGTGCCCAGCA |
| | | GCTCTCTGGGCACCCAGACCTACATCTGCAACGTGA |
| | | ACCACAAGCCCAGCAACACCAAGGTGGACAAGAAG |
| | | GTGGAACCCAAGAGCTGCGACGGCGGAGGGGGATC |
| | | TGGCGGCGGAGGATCCCAGGTGCAATTGGTGCAGTC |
| | | TGGGGCTGAGGTGAAGAAGCCTGGGTCCTCGGTGAA |
| | | GGTCTCCTGCAAGGCCTCCGGAGGCACATTCAGCAG |
| | | CTACGCTATAAGCTGGGTGCGACAGGCCCCTGGACA |
| | | AGGGCTCGAGTGGATGGGAGGGATCATCCCTATCTT |
| | | TGGTACAGCAAACTACGCACAGAAGTTCCAGGGCA |
| | | GGGTCACCATTACTGCAGACAAATCCACGAGCACAG |
| | | CCTACATGGAGCTGAGCAGCCTGAGATCTGAGGACA |
| | | CCGCCGTGTATTACTGTGCGAGAGAATACTACCGTG |
| | | GTCCGTACGACTACTGGGGCCAAGGGACCACCGTGA |
| | | CCGTCTCCTCAGCTAGCACCAAGGGCCCATCGGTCT |
| | | TCCCCCTGGCACCCTCCTCCAAGAGCACCTCTGGGG |
| | | GCACAGCGGCCCTGGGCTGCCTGGTCAAGGACTACT |
| | | TCCCCGAACCGGTGACGGTGTCGTGGAACTCAGGCG |
| | | CCCTGACCAGCGGCGTGCACACCTTCCCGGCTGTCC |
| | | TACAGTCCTCAGGACTCTACTCCCTCAGCAGCGTGG |
| | | TGACCGTGCCCTCCAGCAGCTTGGGCACCCAGACCT |
| | | ACATCTGCAACGTGAATCACAAGCCCAGCAACACCA |
| | | AGGTGGACAAGAAAGTTGAGCCCAAATCTTGTGACA |
| | | AAACTCACACATGCCCACCGTGCCCAGCACCTGAAG |
| | | CTGCAGGGGGACCGTCAGTCTTCCTCTTCCCCCCAA |
| | | AACCCAAGGACACCCTCATGATCTCCCGGACCCCTG |
| | | AGGTCACATGCGTGGTGGTGGACGTGAGCCACGAA |
| | | GACCCTGAGGTCAAGTTCAACTGGTACGTGGACGGC |
| | | GTGGAGGTGCATAATGCCAAGACAAAGCCGCGGGA |
| | | GGAGCAGTACAACAGCACGTACCGTGTGGTCAGCGT |
| | | CCTCACCGTCCTGCACCAGGACTGGCTGAATGGCAA |
| | | GGAGTACAAGTGCAAGGTCTCCAACAAAGCCCTCGG |
| | | CGCCCCCATCGAGAAAACCATCTCCAAAGCCAAAGG |
| | | GCAGCCCCGAGAACCACAGGTGTACACCCTGCCCCC |
| | | CTGCAGAGATGAGCTGACCAAGAACCAGGTGTCCCT |
| | | GTGGTGTCTGGTCAAGGGCTTCTACCCCAGCGATAT |
| | | CGCCGTGGAGTGGGAGAGCAACGGCCAGCCTGAGA |
| | | ACAACTACAAGACCACCCCCCCTGTGCTGGACAGCG |
| | | ACGGCAGCTTCTTCCTGTACTCCAAACTGACCGTGG |
| | | ACAAGAGCCGGTGGCAGCAGGGCAACGTGTTCAGC |
| | | TGCAGCGTGATGCACGAGGCCCTGCACAACCACTAC |
| | | ACCCAGAAGTCCCTGAGCCTGAGCCCCGGCGGAGGC |
| | | GGCGGAAGCGGAGGAGGAGGATCTGGGGGCGGAGG |
| | | TTCCGGAGGCGGAGGATCCGAGGTGCAGCTGCTCGA |
| | | AAGCGGCGGAGGACTGGTGCAGCCTGGCGGCAGCC |
| | | TGAGACTGTCTTGCGCCGCCAGCGGCTTCACCTTCA |
| | | GCAGCTACGCCATGAGCTGGGTCCGCCAGGCCCCTG |
| | | GCAAGGGACTGGAATGGGTGTCCGCCATCATCGGCT |
| | | CTGGCGCCAGCACCTACTACGCCGACAGCGTGAAGG |
| | | GCCGGTTCACCATCAGCCGGGACAACAGCAAGAAC |
| | | ACCCTGTACCTGCAGATGAACAGCCTGCGGGCCGAG |
| | | GACACCGCCGTGTACTACTGCGCCAAGGGATGGTTC |
| | | GGCGGCTTCAACTACTGGGGACAGGGCACCCTGGTC |
| | | ACCGTGTCCAGC |
| 212 | HC 2 | CAGGTGCAATTGGTGCAGTCTGGGGCTGAGGTGAAG |
| | (49B4) | AAGCCTGGGTCCTCGGTGAAGGTCTCCTGCAAGGCC |
| | VHCH1_VHCH1 Fc | TCCGGAGGCACATTCAGCAGCTACGCTATAAGCTGG |
| | hole VL (4B9) | GTGCGACAGGCCCCTGGACAAGGGCTCGAGTGGAT |
| | (nucleotide sequence) | GGGAGGGATCATCCCTATCTTTGGTACAGCAAACTA |
| | | CGCACAGAAGTTCCAGGGCAGGGTCACCATTACTGC |
| | | AGACAAATCCACGAGCACAGCCTACATGGAGCTGA |
| | | GCAGCCTGAGATCTGAGGACACCGCCGTGTATTACT |
| | | GTGCGAGAGAATACTACCGTGGTCCGTACGACTACT |
| | | GGGGCCAAGGGACCACCGTGACCGTCTCCTCAGCTA |
| | | GCACAAAGGGACCTAGCGTGTTCCCCCTGGCCCCCA |
| | | GCAGCAAGTCTACATCTGGCGGAACAGCCGCCCTGG |
| | | GCTGCCTCGTGAAGGACTACTTTCCCGAGCCCGTGA |
| | | CCGTGTCCTGGAACTCTGGCGCTCTGACAAGCGGCG |
| | | TGCACACCTTTCCAGCCGTGCTGCAGAGCAGCGGCC |
| | | TGTACTCTCTGAGCAGCGTCGTGACAGTGCCCAGCA |
| | | GCTCTCTGGGCACCCAGACCTACATCTGCAACGTGA |
| | | ACCACAAGCCCAGCAACACCAAGGTGGACAAGAAG |
| | | GTGGAACCCAAGAGCTGCGACGGCGGAGGGGGATC |
| | | TGGCGGCGGAGGATCCCAGGTGCAATTGGTGCAGTC |
| | | TGGGGCTGAGGTGAAGAAGCCTGGGTCCTCGGTGAA |
| | | GGTCTCCTGCAAGGCCTCCGGAGGCACATTCAGCAG |
| | | CTACGCTATAAGCTGGGTGCGACAGGCCCCTGGACA |
| | | AGGGCTCGAGTGGATGGGAGGGATCATCCCTATCTT |
| | | TGGTACAGCAAACTACGCACAGAAGTTCCAGGGCA |
| | | GGGTCACCATTACTGCAGACAAATCCACGAGCACAG |
| | | CCTACATGGAGCTGAGCAGCCTGAGATCTGAGGACA |
| | | CCGCCGTGTATTACTGTGCGAGAGAATACTACCGTG |
| | | GTCCGTACGACTACTGGGGCCAAGGGACCACCGTGA |
| | | CCGTCTCCTCAGCTAGCACCAAGGGCCCATCGGTCT |
| | | TCCCCCTGGCACCCTCCTCCAAGAGCACCTCTGGGG |
| | | GCACAGCGGCCCTGGGCTGCCTGGTCAAGGACTACT |
| | | TCCCCGAACCGGTGACGGTGTCGTGGAACTCAGGCG |
| | | CCCTGACCAGCGGCGTGCACACCTTCCCGGCTGTCC |
| | | TACAGTCCTCAGGACTCTACTCCCTCAGCAGCGTGG |
| | | TGACCGTGCCCTCCAGCAGCTTGGGCACCCAGACCT |
| | | ACATCTGCAACGTGAATCACAAGCCCAGCAACACCA |
| | | AGGTGGACAAGAAAGTTGAGCCCAAATCTTGTGACA |
| | | AAACTCACACATGCCCACCGTGCCCAGCACCTGAAG |
| | | CTGCAGGGGGACCGTCAGTCTTCCTCTTCCCCCCAA |
| | | AACCCAAGGACACCCTCATGATCTCCCGGACCCCTG |
| | | AGGTCACATGCGTGGTGGTGGACGTGAGCCACGAA |
| | | GACCCTGAGGTCAAGTTCAACTGGTACGTGGACGGC |
| | | GTGGAGGTGCATAATGCCAAGACAAAGCCGCGGGA |
| | | GGAGCAGTACAACAGCACGTACCGTGTGGTCAGCGT |
| | | CCTCACCGTCCTGCACCAGGACTGGCTGAATGGCAA |
| | | GGAGTACAAGTGCAAGGTCTCCAACAAAGCCCTCGG |
| | | CGCCCCCATCGAGAAAACCATCTCCAAAGCCAAAGG |
| | | GCAGCCCCGAGAACCACAGGTGTGCACCCTGCCCCC |
| | | ATCCCGGGATGAGCTGACCAAGAACCAGGTCAGCCT |
| | | CTCGTGCGCAGTCAAAGGCTTCTATCCCAGCGACAT |
| | | CGCCGTGGAGTGGGAGAGCAATGGGCAGCCGGAGA |
| | | ACAACTACAAGACCACGCCTCCCGTGCTGGACTCCG |
| | | ACGGCTCCTTCTTCCTCGTGAGCAAGCTCACCGTGG |
| | | ACAAGAGCAGGTGGCAGCAGGGGAACGTCTTCTCAT |
| | | GCTCCGTGATGCATGAGGCTCTGCACAACCACTACA |
| | | CGCAGAAGAGCCTCTCCCTGTCTCCGGGTGGAGGCG |
| | | GCGGAAGCGGAGGAGGAGGATCCGGCGGCGGAGGT |
| | | TCCGGAGGCGGTGGATCTGAGATCGTGCTGACCCAG |
| | | TCTCCCGGCACCCTGTCTCTGAGCCCTGGCGAGAGA |
| | | GCCACCCTGTCCTGCAGAGCCTCCCAGTCCGTGACC |
| | | TCCTCCTACCTCGCCTGGTATCAGCAGAAGCCCGGC |
| | | CAGGCCCCTCGGCTGCTGATCAACGTGGGCAGTCGG |
| | | AGAGCCACCGGCATCCCTGACCGGTTCTCCGGCTCT |
| | | GGCTCCGGCACCGACTTCACCCTGACCATCTCCCGG |
| | | CTGGAACCCGAGGACTTCGCCGTGTACTACTGCCAG |
| | | CAGGGCATCATGCTGCCCCCCACCTTTGGCCAGGGC |
| | | ACCAAGGTGGAAATCAAG |
| 157 | (49B4) VLCL-light | see Table 13 |
| | chain | |
| 213 | HC 1 | QVQLVQSGAEVKKPGSSVKVSCKASGGTFSSYAISWV |
| | (49B4) | RQAPGQGLEWMGGIIPIFGTANYAQKFQGRVTITADKS |
| | VHCH1_VHCH1 Fc | TSTAYMELSSLRSEDTAVYYCAREYYRGPYDYWGQG |
| | knob VH (4B9) | TTVTVSSASTKGPSVFPLAPSSKSTSGGTAALGCLVKD |
| | | YFPEPVTVSWNSGALTSGVHTFPAVLQSSGLYSLSSVV |
| | | TVPSSSLGTQTYICNVNHKPSNTKVDKKVEPKSCDGG |
| | | GGSGGGGSQVQLVQSGAEVKKPGSSVKVSCKASGGTF |
| | | SSYAISWVRQAPGQGLEWMGGIIPIFGTANYAQKFQGR |
| | | VTITADKSTSTAYMELSSLRSEDTAVYYCAREYYRGPY |
| | | DYWGQGTTVTVSSASTKGPSVFPLAPSSKSTSGGTAAL |
| | | GCLVKDYFPEPVTVSWNSGALTSGVHTFPAVLQSSGL |
| | | YSLSSVVTVPSSSLGTQTYICNVNHKPSNTKVDKKVEP |
| | | KSCDKTHTCPPCPAPEAAGGPSVFLFPPKPKDTLMISRT |
| | | PEVTCVVVDVSHEDPEVKFNWYVDGVEVHNAKTKPR |
| | | EEQYNSTYRVVSVLTVLHQDWLNGKEYKCKVSNKAL |
| | | GAPIEKTISKAKGQPREPQVYTLPPCRDELTKNQVSLW |
| | | CLVKGFYPSDIAVEWESNGQPENNYKTTPPVLDSDGSF |
| | | FLYSKLTVDKSRWQQGNVFSCSVMHEALHNHYTQKS |
| | | LSLSPGGGGGSGGGGSGGGGSGGGGSEVQLLESGGGL |
| | | VQPGGSLRLSCAASGFTFSSYAMSWVRQAPGKGLEW |
| | | VSAIIGSGASTYYADSVKGRFTISRDNSKNTLYLQMNS |
| | | LRAEDTAVYYCAKGWFGGFNYWGQGTLVTVSS |
| 214 | HC 2 | QVQLVQSGAEVKKPGSSVKVSCKASGGTFSSYAISWV |
| | (49B4) | RQAPGQGLEWMGGIIPIFGTANYAQKFQGRVTITADKS |
| | VHCH1_VHCH1 Fc | TSTAYMELSSLRSEDTAVYYCAREYYRGPYDYWGQG |
| | hole VL (4B9) | TTVTVSSASTKGPSVFPLAPSSKSTSGGTAALGCLVKD |
| | | YFPEPVTVSWNSGALTSGVHTFPAVLQSSGLYSLSSVV |
| | | TVPSSSLGTQTYICNVNHKPSNTKVDKKVEPKSCDGG |
| | | GGSGGGGSQVQLVQSGAEVKKPGSSVKVSCKASGGTF |
| | | SSYAISWVRQAPGQGLEWMGGIIPIFGTANYAQKFQGR |
| | | VTITADKSTSTAYMELSSLRSEDTAVYYCAREYYRGPY |
| | | DYWGQGTTVTVSSASTKGPSVFPLAPSSKSTSGGTAAL |
| | | GCLVKDYFPEPVTVSWNSGALTSGVHTFPAVLQSSGL |
| | | YSLSSVVTVPSSSLGTQTYICNVNHKPSNTKVDKKVEP |
| | | KSCDKTHTCPPCPAPEAAGGPSVFLFPPKPKDTLMISRT |
| | | PEVTCVVVDVSHEDPEVKFNWYVDGVEVHNAKTKPR |
| | | EEQYNSTYRVVSVLTVLHQDWLNGKEYKCKVSNKAL |
| | | GAPIEKTISKAKGQPREPQVCTLPPSRDELTKNQVSLSC |
| | | AVKGFYPSDIAVEWESNGQPENNYKTTPPVLDSDGSFF |
| | | LVSKLTVDKSRWQQGNVFSCSVMHEALHNHYTQKSL |
| | | SLSPGGGGGSGGGGSGGGGSGGGGSEIVLTQSPGTLSL |
| | | SPGERATLSCRASQSVTSSYLAWYQQKPGQAPRLLINV |
| | | GSRRATGIPDRFSGSGSGTDFTLTISRLEPEDFAVYYCQ |
| | | QGIMLPPTFGQGTKVEIK |
| 155 | (49B4) VLCL-light | see Table 13 |
| | chain | |
| | (nucleotide sequence) | |
| 215 | HC 1 | CAGGTGCAATTGGTGCAGTCTGGGGCTGAGGTGAAG |
| | (49B4) | AAGCCTGGGTCCTCGGTGAAGGTCTCCTGCAAGGCC |
| | VHCH1_VHCH1 Fc | TCCGGAGGCACATTCAGCAGCTACGCTATAAGCTGG |
| | knob VH (28H1) | GTGCGACAGGCCCCTGGACAAGGGCTCGAGTGGAT |
| | (nucleotide sequence) | GGGAGGGATCATCCCTATCTTTGGTACAGCAAACTA |
| | | CGCACAGAAGTTCCAGGGCAGGGTCACCATTACTGC |
| | | AGACAAATCCACGAGCACAGCCTACATGGAGCTGA |
| | | GCAGCCTGAGATCTGAGGACACCGCCGTGTATTACT |
| | | GTGCGAGAGAATACTACCGTGGTCCGTACGACTACT |
| | | GGGGCCAAGGGACCACCGTGACCGTCTCCTCAGCTA |
| | | GCACAAAGGGACCTAGCGTGTTCCCCCTGGCCCCCA |
| | | GCAGCAAGTCTACATCTGGCGGAACAGCCGCCCTGG |
| | | GCTGCCTCGTGAAGGACTACTTTCCCGAGCCCGTGA |
| | | CCGTGTCCTGGAACTCTGGCGCTCTGACAAGCGGCG |
| | | TGCACACCTTTCCAGCCGTGCTGCAGAGCAGCGGCC |
| | | TGTACTCTCTGAGCAGCGTCGTGACAGTGCCCAGCA |
| | | GCTCTCTGGGCACCCAGACCTACATCTGCAACGTGA |
| | | ACCACAAGCCCAGCAACACCAAGGTGGACAAGAAG |
| | | GTGGAACCCAAGAGCTGCGACGGCGGAGGGGGATC |
| | | TGGCGGCGGAGGATCCCAGGTGCAATTGGTGCAGTC |
| | | TGGGGCTGAGGTGAAGAAGCCTGGGTCCTCGGTGAA |
| | | GGTCTCCTGCAAGGCCTCCGGAGGCACATTCAGCAG |
| | | CTACGCTATAAGCTGGGTGCGACAGGCCCCTGGACA |
| | | AGGGCTCGAGTGGATGGGAGGGATCATCCCTATCTT |
| | | TGGTACAGCAAACTACGCACAGAAGTTCCAGGGCA |
| | | GGGTCACCATTACTGCAGACAAATCCACGAGCACAG |
| | | CCTACATGGAGCTGAGCAGCCTGAGATCTGAGGACA |
| | | CCGCCGTGTATTACTGTGCGAGAGAATACTACCGTG |
| | | GTCCGTACGACTACTGGGGCCAAGGGACCACCGTGA |
| | | CCGTCTCCTCAGCTAGCACCAAGGGCCCATCGGTCT |
| | | TCCCCCTGGCACCCTCCTCCAAGAGCACCTCTGGGG |
| | | GCACAGCGGCCCTGGGCTGCCTGGTCAAGGACTACT |
| | | TCCCCGAACCGGTGACGGTGTCGTGGAACTCAGGCG |
| | | CCCTGACCAGCGGCGTGCACACCTTCCCGGCTGTCC |
| | | TACAGTCCTCAGGACTCTACTCCCTCAGCAGCGTGG |
| | | TGACCGTGCCCTCCAGCAGCTTGGGCACCCAGACCT |
| | | ACATCTGCAACGTGAATCACAAGCCCAGCAACACCA |
| | | AGGTGGACAAGAAAGTTGAGCCCAAATCTTGTGACA |
| | | AAACTCACACATGCCCACCGTGCCCAGCACCTGAAG |
| | | CTGCAGGGGGACCGTCAGTCTTCCTCTTCCCCCCAA |
| | | AACCCAAGGACACCCTCATGATCTCCCGGACCCCTG |
| | | AGGTCACATGCGTGGTGGTGGACGTGAGCCACGAA |
| | | GACCCTGAGGTCAAGTTCAACTGGTACGTGGACGGC |
| | | GTGGAGGTGCATAATGCCAAGACAAAGCCGCGGGA |
| | | GGAGCAGTACAACAGCACGTACCGTGTGGTCAGCGT |
| | | CCTCACCGTCCTGCACCAGGACTGGCTGAATGGCAA |
| | | GGAGTACAAGTGCAAGGTCTCCAACAAAGCCCTCGG |
| | | CGCCCCCATCGAGAAAACCATCTCCAAAGCCAAAGG |
| | | GCAGCCCCGAGAACCACAGGTGTACACCCTGCCCCC |
| | | CTGCAGAGATGAGCTGACCAAGAACCAGGTGTCCCT |
| | | GTGGTGTCTGGTCAAGGGCTTCTACCCCAGCGATAT |
| | | CGCCGTGGAGTGGGAGAGCAACGGCCAGCCTGAGA |
| | | ACAACTACAAGACCACCCCCCCTGTGCTGGACAGCG |
| | | ACGGCAGCTTCTTCCTGTACTCCAAACTGACCGTGG |
| | | ACAAGAGCCGGTGGCAGCAGGGCAACGTGTTCAGC |
| | | TGCAGCGTGATGCACGAGGCCCTGCACAACCACTAC |
| | | ACCCAGAAGTCCCTGAGCCTGAGCCCCGGCGGAGGC |
| | | GGCGGAAGCGGAGGAGGAGGATCCGGAGGAGGGG |
| | | GAAGTGGCGGCGGAGGATCTGAGGTGCAGCTGCTG |
| | | GAATCCGGCGGAGGCCTGGTGCAGCCTGGCGGATCT |
| | | CTGAGACTGTCCTGCGCCGCCTCCGGCTTCACCTTCT |
| | | CCTCCCACGCCATGTCCTGGGTCCGACAGGCTCCTG |
| | | GCAAAGGCCTGGAATGGGTGTCCGCCATCTGGGCCT |
| | | CCGGCGAGCAGTACTACGCCGACTCTGTGAAGGGCC |
| | | GGTTCACCATCTCCCGGGACAACTCCAAGAACACCC |
| | | TGTACCTGCAGATGAACTCCCTGCGGGCCGAGGACA |
| | | CCGCCGTGTACTACTGTGCCAAGGGCTGGCTGGGCA |
| | | ACTTCGACTACTGGGGCCAGGGCACCCTGGTCACCG |
| | | TGTCCAGC |
| 216 | HC 2 | CAGGTGCAATTGGTGCAGTCTGGGGCTGAGGTGAAG |
| | (49B4) | AAGCCTGGGTCCTCGGTGAAGGTCTCCTGCAAGGCC |
| | VHCH1_VHCH1 Fc | TCCGGAGGCACATTCAGCAGCTACGCTATAAGCTGG |
| | hole VL (28H1) | GTGCGACAGGCCCCTGGACAAGGGCTCGAGTGGAT |
| | (nucleotide sequence) | GGGAGGGATCATCCCTATCTTTGGTACAGCAAACTA |
| | | CGCACAGAAGTTCCAGGGCAGGGTCACCATTACTGC |
| | | AGACAAATCCACGAGCACAGCCTACATGGAGCTGA |
| | | GCAGCCTGAGATCTGAGGACACCGCCGTGTATTACT |
| | | GTGCGAGAGAATACTACCGTGGTCCGTACGACTACT |
| | | GGGGCCAAGGGACCACCGTGACCGTCTCCTCAGCTA |
| | | GCACAAAGGGACCTAGCGTGTTCCCCCTGGCCCCCA |
| | | GCAGCAAGTCTACATCTGGCGGAACAGCCGCCCTGG |
| | | GCTGCCTCGTGAAGGACTACTTTCCCGAGCCCGTGA |
| | | CCGTGTCCTGGAACTCTGGCGCTCTGACAAGCGGCG |
| | | TGCACACCTTTCCAGCCGTGCTGCAGAGCAGCGGCC |
| | | TGTACTCTCTGAGCAGCGTCGTGACAGTGCCCAGCA |
| | | GCTCTCTGGGCACCCAGACCTACATCTGCAACGTGA |
| | | ACCACAAGCCCAGCAACACCAAGGTGGACAAGAAG |
| | | GTGGAACCCAAGAGCTGCGACGGCGGAGGGGGATC |
| | | TGGCGGCGGAGGATCCCAGGTGCAATTGGTGCAGTC |
| | | TGGGGCTGAGGTGAAGAAGCCTGGGTCCTCGGTGAA |
| | | GGTCTCCTGCAAGGCCTCCGGAGGCACATTCAGCAG |
| | | CTACGCTATAAGCTGGGTGCGACAGGCCCCTGGACA |
| | | AGGGCTCGAGTGGATGGGAGGGATCATCCCTATCTT |
| | | TGGTACAGCAAACTACGCACAGAAGTTCCAGGGCA |
| | | GGGTCACCATTACTGCAGACAAATCCACGAGCACAG |
| | | CCTACATGGAGCTGAGCAGCCTGAGATCTGAGGACA |
| | | CCGCCGTGTATTACTGTGCGAGAGAATACTACCGTG |
| | | GTCCGTACGACTACTGGGGCCAAGGGACCACCGTGA |
| | | CCGTCTCCTCAGCTAGCACCAAGGGCCCATCGGTCT |
| | | TCCCCCTGGCACCCTCCTCCAAGAGCACCTCTGGGG |
| | | GCACAGCGGCCCTGGGCTGCCTGGTCAAGGACTACT |
| | | TCCCCGAACCGGTGACGGTGTCGTGGAACTCAGGCG |
| | | CCCTGACCAGCGGCGTGCACACCTTCCCGGCTGTCC |
| | | TACAGTCCTCAGGACTCTACTCCCTCAGCAGCGTGG |
| | | TGACCGTGCCCTCCAGCAGCTTGGGCACCCAGACCT |
| | | ACATCTGCAACGTGAATCACAAGCCCAGCAACACCA |
| | | AGGTGGACAAGAAAGTTGAGCCCAAATCTTGTGACA |
| | | AAACTCACACATGCCCACCGTGCCCAGCACCTGAAG |
| | | CTGCAGGGGGACCGTCAGTCTTCCTCTTCCCCCCAA |
| | | AACCCAAGGACACCCTCATGATCTCCCGGACCCCTG |
| | | AGGTCACATGCGTGGTGGTGGACGTGAGCCACGAA |
| | | GACCCTGAGGTCAAGTTCAACTGGTACGTGGACGGC |
| | | GTGGAGGTGCATAATGCCAAGACAAAGCCGCGGGA |
| | | GGAGCAGTACAACAGCACGTACCGTGTGGTCAGCGT |
| | | CCTCACCGTCCTGCACCAGGACTGGCTGAATGGCAA |
| | | GGAGTACAAGTGCAAGGTCTCCAACAAAGCCCTCGG |
| | | CGCCCCCATCGAGAAAACCATCTCCAAAGCCAAAGG |
| | | GCAGCCCCGAGAACCACAGGTGTGCACCCTGCCCCC |
| | | ATCCCGGGATGAGCTGACCAAGAACCAGGTCAGCCT |
| | | CTCGTGCGCAGTCAAAGGCTTCTATCCCAGCGACAT |
| | | CGCCGTGGAGTGGGAGAGCAATGGGCAGCCGGAGA |
| | | ACAACTACAAGACCACGCCTCCCGTGCTGGACTCCG |
| | | ACGGCTCCTTCTTCCTCGTGAGCAAGCTCACCGTGG |
| | | ACAAGAGCAGGTGGCAGCAGGGGAACGTCTTCTCAT |
| | | GCTCCGTGATGCATGAGGCTCTGCACAACCACTACA |
| | | CGCAGAAGAGCCTCTCCCTGTCTCCGGGTGGAGGCG |
| | | GCGGAAGCGGAGGAGGAGGATCCGGTGGTGGCGGA |
| | | TCTGGGGGCGGTGGATCTGAGATCGTGCTGACCCAG |
| | | TCTCCCGGCACCCTGAGCCTGAGCCCTGGCGAGAGA |
| | | GCCACCCTGAGCTGCAGAGCCAGCCAGAGCGTGAG |
| | | CCGGAGCTACCTGGCCTGGTATCAGCAGAAGCCCGG |
| | | CCAGGCCCCCAGACTGCTGATCATCGGCGCCAGCAC |
| | | CCGGGCCACCGGCATCCCCGATAGATTCAGCGGCAG |
| | | CGGCTCCGGCACCGACTTCACCCTGACCATCAGCCG |
| | | GCTGGAACCCGAGGACTTCGCCGTGTACTACTGCCA |
| | | GCAGGGCCAGGTGATCCCCCCCACCTTCGGCCAGGG |
| | | CACCAAGGTGGAAATCAAG |
| 157 | (49B4) VLCL-light | see Table 13 |
| | chain | |
| 217 | HC 1 | QVQLVQSGAEVKKPGSSVKVSCKASGGTFSSYAISWV |
| | (49B4) | RQAPGQGLEWMGGIIPIFGTANYAQKFQGRVTITADKS |
| | VHCH1_VHCH1 Fc | TSTAYMELSSLRSEDTAVYYCAREYYRGPYDYWGQG |
| | knob VH (28H1) | TTVTVSSASTKGPSVFPLAPSSKSTSGGTAALGCLVKD |
| | | YFPEPVTVSWNSGALTSGVHTFPAVLQSSGLYSLSSVV |
| | | TVPSSSLGTQTYICNVNHKPSNTKVDKKVEPKSCDGG |
| | | GGSGGGGSQVQLVQSGAEVKKPGSSVKVSCKASGGTF |
| | | SSYAISWVRQAPGQGLEWMGGIIPIFGTANYAQKFQGR |
| | | VTITADKSTSTAYMELSSLRSEDTAVYYCAREYYRGPY |
| | | DYWGQGTTVTVSSASTKGPSVFPLAPSSKSTSGGTAAL |
| | | GCLVKDYFPEPVTVSWNSGALTSGVHTFPAVLQSSGL |
| | | YSLSSVVTVPSSSLGTQTYICNVNHKPSNTKVDKKVEP |
| | | KSCDKTHTCPPCPAPEAAGGPSVFLFPPKPKDTLMISRT |
| | | PEVTCVVVDVSHEDPEVKFNWYVDGVEVHNAKTKPR |
| | | EEQYNSTYRVVSVLTVLHQDWLNGKEYKCKVSNKAL |
| | | GAPIEKTISKAKGQPREPQVYTLPPCRDELTKNQVSLW |
| | | CLVKGFYPSDIAVEWESNGQPENNYKTTPPVLDSDGSF |
| | | FLYSKLTVDKSRWQQGNVFSCSVMHEALHNHYTQKS |
| | | LSLSPGGGGGSGGGGSGGGGSGGGGSEVQLLESGGGL |
| | | VQPGGSLRLSCAASGFTFSSHAMSWVRQAPGKGLEW |
| | | VSAIWASGEQYYADSVKGRFTISRDNSKNTLYLQMNS |
| | | LRAEDTAVYYCAKGWLGNFDYWGQGTLVTVSS |
| 218 | HC 2 | QVQLVQSGAEVKKPGSSVKVSCKASGGTFSSYAISWV |
| | (49B4) | RQAPGQGLEWMGGIIPIFGTANYAQKFQGRVTITADKS |
| | VHCH1_VHCH1 Fc | TSTAYMELSSLRSEDTAVYYCAREYYRGPYDYWGQG |
| | hole VL (28H1) | TTVTVSSASTKGPSVFPLAPSSKSTSGGTAALGCLVKD |
| | | YFPEPVTVSWNSGALTSGVHTFPAVLQSSGLYSLSSVV |
| | | TVPSSSLGTQTYICNVNHKPSNTKVDKKVEPKSCDGG |
| | | GGSGGGGSQVQLVQSGAEVKKPGSSVKVSCKASGGTF |
| | | SSYAISWVRQAPGQGLEWMGGIIPIFGTANYAQKFQGR |
| | | VTITADKSTSTAYMELSSLRSEDTAVYYCAREYYRGPY |
| | | DYWGQGTTVTVSSASTKGPSVFPLAPSSKSTSGGTAAL |
| | | GCLVKDYFPEPVTVSWNSGALTSGVHTFPAVLQSSGL |
| | | YSLSSVVTVPSSSLGTQTYICNVNHKPSNTKVDKKVEP |
| | | KSCDKTHTCPPCPAPEAAGGPSVFLFPPKPKDTLMISRT |
| | | PEVTCVVVDVSHEDPEVKFNWYVDGVEVHNAKTKPR |
| | | EEQYNSTYRVVSVLTVLHQDWLNGKEYKCKVSNKAL |
| | | GAPIEKTISKAKGQPREPQVCTLPPSRDELTKNQVSLSC |
| | | AVKGFYPSDIAVEWESNGQPENNYKTTPPVLDSDGSFF |
| | | LVSKLTVDKSRWQQGNVFSCSVMHEALHNHYTQKSL |
| | | SLSPGGGGGSGGGGSGGGGSGGGGSEIVLTQSPGTLSL |
| | | SPGERATLSCRASQSVSRSYLAWYQQKPGQAPRLLIIG |
| | | ASTRATGIPDRFSGSGSGTDFTLTISRLEPEDFAVYYCQ |
| | | QGQVIPPTFGQGTKVEIK |
| 155 | (49B4) VLCL-light | see Table 13 |
| | chain | |
| | (nucleotide sequence) | |
| 219 | HC 1 | CAGGTGCAATTGGTGCAGTCTGGGGCTGAGGTGAAG |
| | (49B4) | AAGCCTGGGTCCTCGGTGAAGGTCTCCTGCAAGGCC |
| | VHCH1_VHCH1 Fc | TCCGGAGGCACATTCAGCAGCTACGCTATAAGCTGG |
| | knob VH (DP47) | GTGCGACAGGCCCCTGGACAAGGGCTCGAGTGGAT |
| | (nucleotide sequence) | GGGAGGGATCATCCCTATCTTTGGTACAGCAAACTA |
| | | CGCACAGAAGTTCCAGGGCAGGGTCACCATTACTGC |
| | | AGACAAATCCACGAGCACAGCCTACATGGAGCTGA |
| | | GCAGCCTGAGATCTGAGGACACCGCCGTGTATTACT |
| | | GTGCGAGAGAATACTACCGTGGTCCGTACGACTACT |
| | | GGGGCCAAGGGACCACCGTGACCGTCTCCTCAGCTA |
| | | GCACAAAGGGACCTAGCGTGTTCCCCCTGGCCCCCA |
| | | GCAGCAAGTCTACATCTGGCGGAACAGCCGCCCTGG |
| | | GCTGCCTCGTGAAGGACTACTTTCCCGAGCCCGTGA |
| | | CCGTGTCCTGGAACTCTGGCGCTCTGACAAGCGGCG |
| | | TGCACACCTTTCCAGCCGTGCTGCAGAGCAGCGGCC |
| | | TGTACTCTCTGAGCAGCGTCGTGACAGTGCCCAGCA |
| | | GCTCTCTGGGCACCCAGACCTACATCTGCAACGTGA |
| | | ACCACAAGCCCAGCAACACCAAGGTGGACAAGAAG |
| | | GTGGAACCCAAGAGCTGCGACGGCGGAGGGGGATC |
| | | TGGCGGCGGAGGATCCCAGGTGCAATTGGTGCAGTC |
| | | TGGGGCTGAGGTGAAGAAGCCTGGGTCCTCGGTGAA |
| | | GGTCTCCTGCAAGGCCTCCGGAGGCACATTCAGCAG |
| | | CTACGCTATAAGCTGGGTGCGACAGGCCCCTGGACA |
| | | AGGGCTCGAGTGGATGGGAGGGATCATCCCTATCTT |
| | | TGGTACAGCAAACTACGCACAGAAGTTCCAGGGCA |
| | | GGGTCACCATTACTGCAGACAAATCCACGAGCACAG |
| | | CCTACATGGAGCTGAGCAGCCTGAGATCTGAGGACA |
| | | CCGCCGTGTATTACTGTGCGAGAGAATACTACCGTG |
| | | GTCCGTACGACTACTGGGGCCAAGGGACCACCGTGA |
| | | CCGTCTCCTCAGCTAGCACCAAGGGCCCATCGGTCT |
| | | TCCCCCTGGCACCCTCCTCCAAGAGCACCTCTGGGG |
| | | GCACAGCGGCCCTGGGCTGCCTGGTCAAGGACTACT |
| | | TCCCCGAACCGGTGACGGTGTCGTGGAACTCAGGCG |
| | | CCCTGACCAGCGGCGTGCACACCTTCCCGGCTGTCC |
| | | TACAGTCCTCAGGACTCTACTCCCTCAGCAGCGTGG |
| | | TGACCGTGCCCTCCAGCAGCTTGGGCACCCAGACCT |
| | | ACATCTGCAACGTGAATCACAAGCCCAGCAACACCA |
| | | AGGTGGACAAGAAAGTTGAGCCCAAATCTTGTGACA |
| | | AAACTCACACATGCCCACCGTGCCCAGCACCTGAAG |
| | | CTGCAGGGGGACCGTCAGTCTTCCTCTTCCCCCCAA |
| | | AACCCAAGGACACCCTCATGATCTCCCGGACCCCTG |
| | | AGGTCACATGCGTGGTGGTGGACGTGAGCCACGAA |
| | | GACCCTGAGGTCAAGTTCAACTGGTACGTGGACGGC |
| | | GTGGAGGTGCATAATGCCAAGACAAAGCCGCGGGA |
| | | GGAGCAGTACAACAGCACGTACCGTGTGGTCAGCGT |
| | | CCTCACCGTCCTGCACCAGGACTGGCTGAATGGCAA |
| | | GGAGTACAAGTGCAAGGTCTCCAACAAAGCCCTCGG |
| | | CGCCCCCATCGAGAAAACCATCTCCAAAGCCAAAGG |
| | | GCAGCCCCGAGAACCACAGGTGTACACCCTGCCCCC |
| | | CTGCAGAGATGAGCTGACCAAGAACCAGGTGTCCCT |
| | | GTGGTGTCTGGTCAAGGGCTTCTACCCCAGCGATAT |
| | | CGCCGTGGAGTGGGAGAGCAACGGCCAGCCTGAGA |
| | | ACAACTACAAGACCACCCCCCCTGTGCTGGACAGCG |
| | | ACGGCAGCTTCTTCCTGTACTCCAAACTGACCGTGG |
| | | ACAAGAGCCGGTGGCAGCAGGGCAACGTGTTCAGC |
| | | TGCAGCGTGATGCACGAGGCCCTGCACAACCACTAC |
| | | ACCCAGAAGTCCCTGAGCCTGAGCCCCGGCGGAGGC |
| | | GGCGGAAGCGGAGGAGGAGGATCCGGAGGAGGGG |
| | | GAAGTGGCGGCGGAGGATCTGAGGTGCAATTGTTGG |
| | | AGTCTGGGGGAGGCTTGGTACAGCCTGGGGGGTCCC |
| | | TGAGACTCTCCTGTGCAGCCAGCGGATTCACCTTTA |
| | | GCAGTTATGCCATGAGCTGGGTCCGCCAGGCTCCAG |
| | | GGAAGGGGCTGGAGTGGGTCTCAGCTATTAGTGGTA |
| | | GTGGTGGTAGCACATACTACGCAGACTCCGTGAAGG |
| | | GCCGGTTCACCATCTCCAGAGACAATTCCAAGAACA |
| | | CGCTGTATCTGCAGATGAACAGCCTGAGAGCCGAGG |
| | | ACACGGCCGTATATTACTGTGCGAAAGGCAGCGGAT |
| | | TTGACTACTGGGGCCAAGGAACCCTGGTCACCGTCT |
| | | CGAGC |
| 220 | HC 2 | CAGGTGCAATTGGTGCAGTCTGGGGCTGAGGTGAAG |
| | (49B4) | AAGCCTGGGTCCTCGGTGAAGGTCTCCTGCAAGGCC |
| | VHCH1_VHCH1 Fc | TCCGGAGGCACATTCAGCAGCTACGCTATAAGCTGG |
| | hole VL (DP47) | GTGCGACAGGCCCCTGGACAAGGGCTCGAGTGGAT |
| | (nucleotide sequence) | GGGAGGGATCATCCCTATCTTTGGTACAGCAAACTA |
| | | CGCACAGAAGTTCCAGGGCAGGGTCACCATTACTGC |
| | | AGACAAATCCACGAGCACAGCCTACATGGAGCTGA |
| | | GCAGCCTGAGATCTGAGGACACCGCCGTGTATTACT |
| | | GTGCGAGAGAATACTACCGTGGTCCGTACGACTACT |
| | | GGGGCCAAGGGACCACCGTGACCGTCTCCTCAGCTA |
| | | GCACAAAGGGACCTAGCGTGTTCCCCCTGGCCCCCA |
| | | GCAGCAAGTCTACATCTGGCGGAACAGCCGCCCTGG |
| | | GCTGCCTCGTGAAGGACTACTTTCCCGAGCCCGTGA |
| | | CCGTGTCCTGGAACTCTGGCGCTCTGACAAGCGGCG |
| | | TGCACACCTTTCCAGCCGTGCTGCAGAGCAGCGGCC |
| | | TGTACTCTCTGAGCAGCGTCGTGACAGTGCCCAGCA |
| | | GCTCTCTGGGCACCCAGACCTACATCTGCAACGTGA |
| | | ACCACAAGCCCAGCAACACCAAGGTGGACAAGAAG |
| | | GTGGAACCCAAGAGCTGCGACGGCGGAGGGGGATC |
| | | TGGCGGCGGAGGATCCCAGGTGCAATTGGTGCAGTC |
| | | TGGGGCTGAGGTGAAGAAGCCTGGGTCCTCGGTGAA |
| | | GGTCTCCTGCAAGGCCTCCGGAGGCACATTCAGCAG |
| | | CTACGCTATAAGCTGGGTGCGACAGGCCCCTGGACA |
| | | AGGGCTCGAGTGGATGGGAGGGATCATCCCTATCTT |
| | | TGGTACAGCAAACTACGCACAGAAGTTCCAGGGCA |
| | | GGGTCACCATTACTGCAGACAAATCCACGAGCACAG |
| | | CCTACATGGAGCTGAGCAGCCTGAGATCTGAGGACA |
| | | CCGCCGTGTATTACTGTGCGAGAGAATACTACCGTG |
| | | GTCCGTACGACTACTGGGGCCAAGGGACCACCGTGA |
| | | CCGTCTCCTCAGCTAGCACCAAGGGCCCATCGGTCT |
| | | TCCCCCTGGCACCCTCCTCCAAGAGCACCTCTGGGG |
| | | GCACAGCGGCCCTGGGCTGCCTGGTCAAGGACTACT |
| | | TCCCCGAACCGGTGACGGTGTCGTGGAACTCAGGCG |
| | | CCCTGACCAGCGGCGTGCACACCTTCCCGGCTGTCC |
| | | TACAGTCCTCAGGACTCTACTCCCTCAGCAGCGTGG |
| | | TGACCGTGCCCTCCAGCAGCTTGGGCACCCAGACCT |
| | | ACATCTGCAACGTGAATCACAAGCCCAGCAACACCA |
| | | AGGTGGACAAGAAAGTTGAGCCCAAATCTTGTGACA |
| | | AAACTCACACATGCCCACCGTGCCCAGCACCTGAAG |
| | | CTGCAGGGGGACCGTCAGTCTTCCTCTTCCCCCCAA |
| | | AACCCAAGGACACCCTCATGATCTCCCGGACCCCTG |
| | | AGGTCACATGCGTGGTGGTGGACGTGAGCCACGAA |
| | | GACCCTGAGGTCAAGTTCAACTGGTACGTGGACGGC |
| | | GTGGAGGTGCATAATGCCAAGACAAAGCCGCGGGA |
| | | GGAGCAGTACAACAGCACGTACCGTGTGGTCAGCGT |
| | | CCTCACCGTCCTGCACCAGGACTGGCTGAATGGCAA |
| | | GGAGTACAAGTGCAAGGTCTCCAACAAAGCCCTCGG |
| | | CGCCCCCATCGAGAAAACCATCTCCAAAGCCAAAGG |
| | | GCAGCCCCGAGAACCACAGGTGTGCACCCTGCCCCC |
| | | ATCCCGGGATGAGCTGACCAAGAACCAGGTCAGCCT |
| | | CTCGTGCGCAGTCAAAGGCTTCTATCCCAGCGACAT |
| | | CGCCGTGGAGTGGGAGAGCAATGGGCAGCCGGAGA |
| | | ACAACTACAAGACCACGCCTCCCGTGCTGGACTCCG |
| | | ACGGCTCCTTCTTCCTCGTGAGCAAGCTCACCGTGG |
| | | ACAAGAGCAGGTGGCAGCAGGGGAACGTCTTCTCAT |
| | | GCTCCGTGATGCATGAGGCTCTGCACAACCACTACA |
| | | CGCAGAAGAGCCTCTCCCTGTCTCCGGGTGGAGGCG |
| | | GCGGAAGCGGAGGAGGAGGATCCGGAGGCGGCGGA |
| | | AGCGGAGGGGGAGGCTCTGAAATTGTGCTGACCCA |
| | | GAGCCCCGGCACCCTGTCACTGTCTCCAGGCGAAAG |
| | | AGCCACCCTGAGCTGCAGAGCCAGCCAGAGCGTGTC |
| | | CAGCTCTTACCTGGCCTGGTATCAGCAGAAGCCCGG |
| | | ACAGGCCCCCAGACTGCTGATCTACGGCGCCTCTTC |
| | | TAGAGCCACCGGCATCCCCGATAGATTCAGCGGCAG |
| | | CGGCTCCGGCACCGACTTCACCCTGACAATCAGCAG |
| | | ACTGGAACCCGAGGACTTTGCCGTGTATTACTGCCA |
| | | GCAGTACGGCAGCAGCCCCCTGACCTTTGGCCAGGG |
| | | CACCAAGGTGGAAATCAAA |
| 157 | (49B4) VLCL-light | see Table 13 |
| | chain | |
| 221 | HC 1 | QVQLVQSGAEVKKPGSSVKVSCKASGGTFSSYAISWV |
| | (49B4) | RQAPGQGLEWMGGIIPIFGTANYAQKFQGRVTITADKS |
| | VHCH1_VHCH1 Fc | TSTAYMELSSLRSEDTAVYYCAREYYRGPYDYWGQG |
| | knob VH (DP47) | TTVTVSSASTKGPSVFPLAPSSKSTSGGTAALGCLVKD |
| | | YFPEPVTVSWNSGALTSGVHTFPAVLQSSGLYSLSSVV |
| | | TVPSSSLGTQTYICNVNHKPSNTKVDKKVEPKSCDGG |
| | | GGSGGGGSQVQLVQSGAEVKKPGSSVKVSCKASGGTF |
| | | SSYAISWVRQAPGQGLEWMGGIIPIFGTANYAQKFQGR |
| | | VTITADKSTSTAYMELSSLRSEDTAVYYCAREYYRGPY |
| | | DYWGQGTTVTVSSASTKGPSVFPLAPSSKSTSGGTAAL |
| | | GCLVKDYFPEPVTVSWNSGALTSGVHTFPAVLQSSGL |
| | | YSLSSVVTVPSSSLGTQTYICNVNHKPSNTKVDKKVEP |
| | | KSCDKTHTCPPCPAPEAAGGPSVFLFPPKPKDTLMISRT |
| | | PEVTCVVVDVSHEDPEVKFNWYVDGVEVHNAKTKPR |
| | | EEQYNSTYRVVSVLTVLHQDWLNGKEYKCKVSNKAL |
| | | GAPIEKTISKAKGQPREPQVYTLPPCRDELTKNQVSLW |
| | | CLVKGFYPSDIAVEWESNGQPENNYKTTPPVLDSDGSF |
| | | FLYSKLTVDKSRWQQGNVFSCSVMHEALHNHYTQKS |
| | | LSLSPGGGGGSGGGGSGGGGSGGGGSEVQLLESGGGL |
| | | VQPGGSLRLSCAASGFTFSSYAMSWVRQAPGKGLEW |
| | | VSAISGSGGSTYYADSVKGRFTISRDNSKNTLYLQMNS |
| | | LRAEDTAVYYCAKGSGFDYWGQGTLVTVSS |
| 222 | HC 2 | QVQLVQSGAEVKKPGSSVKVSCKASGGTFSSYAISWV |
| | (49B4) | RQAPGQGLEWMGGIIPIFGTANYAQKFQGRVTITADKS |
| | VHCH1_VHCH1 Fc | TSTAYMELSSLRSEDTAVYYCAREYYRGPYDYWGQG |
| | hole VL (DP47) | TTVTVSSASTKGPSVFPLAPSSKSTSGGTAALGCLVKD |
| | | YFPEPVTVSWNSGALTSGVHTFPAVLQSSGLYSLSSVV |
| | | TVPSSSLGTQTYICNVNHKPSNTKVDKKVEPKSCDGG |
| | | GGSGGGGSQVQLVQSGAEVKKPGSSVKVSCKASGGTF |
| | | SSYAISWVRQAPGQGLEWMGGIIPIFGTANYAQKFQGR |
| | | VTITADKSTSTAYMELSSLRSEDTAVYYCAREYYRGPY |
| | | DYWGQGTTVTVSSASTKGPSVFPLAPSSKSTSGGTAAL |
| | | GCLVKDYFPEPVTVSWNSGALTSGVHTFPAVLQSSGL |
| | | YSLSSVVTVPSSSLGTQTYICNVNHKPSNTKVDKKVEP |
| | | KSCDKTHTCPPCPAPEAAGGPSVFLFPPKPKDTLMISRT |
| | | PEVTCVVVDVSHEDPEVKFNWYVDGVEVHNAKTKPR |
| | | EEQYNSTYRVVSVLTVLHQDWLNGKEYKCKVSNKAL |
| | | GAPIEKTISKAKGQPREPQVCTLPPSRDELTKNQVSLSC |
| | | AVKGFYPSDIAVEWESNGQPENNYKTTPPVLDSDGSFF |
| | | LVSKLTVDKSRWQQGNVFSCSVMHEALHNHYTQKSL |
| | | SLSPGGGGGSGGGGSGGGGSGGGGSEIVLTQSPGTLSL |
| | | SPGERATLSCRASQSVSSSYLAWYQQKPGQAPRLLIYG |
| | | ASSRATGIPDRFSGSGSGTDFTLTISRLEPEDFAVYYCQ |
| | | QYGSSPLTFGQGTKVEIK |

[0760] In a further example, the first heavy chain (HC 1) is comprised of two Fab units (VHCH1_VHCH1) of the anti-OX40 binder 49B4 followed by Fc knob chain fused by a (G4S) linker to a VL domain of the anti-FAP binder 4B9. The second heavy chain (HC 2) of the construct is comprised of two Fab units (VHCH1_VHCH1) of the anti-OX40 binder 49B4 followed Fc hole chain fused by a (G4S) linker to a VH domain of the anti-FAP binder 4B9.

[0761] The amino acid sequences for a 4+1 anti-Ox40, anti-FAP construct with a-FAP VL fused to knob and VH fused to hole chain can be found respectively in Table 31.

TABLE 31
Amino acid sequences of mature bispecific tetravalent
anti-Ox40/monovalent anti-FAP huIgG1 P329GLALA kih antibody
(4 + 1 format) anti-FAP VH fused to hole and anti-FAP VL fused
to knob chain

| SEQ ID | | |
|---|---|---|
| NO: | Description | Sequence |
| 157 | (49B4) VLCL-light | see Table 13 |
| | chain | |
| 233 | HC 1 | QVQLVQSGAEVKKPGSSVKVSCKASGGTFSSYAISWV |
| | (49B4) | RQAPGQGLEWMGGIIPIFGTANYAQKFQGRVTITADKS |
| | VHCH1_VHCH1 Fc | TSTAYMELSSLRSEDTAVYYCAREYYRGPYDYWGQG |
| | knob VL (4B9) | TTVTVSSASTKGPSVFPLAPSSKSTSGGTAALGCLVKD |
| | | YFPEPVTVSWNSGALTSGVHTFPAVLQSSGLYSLSSVV |
| | | TVPSSSLGTQTYICNVNHKPSNTKVDKKVEPKSCDGG |
| | | GGSGGGGSQVQLVQSGAEVKKPGSSVKVSCKASGGTF |
| | | SSYAISWVRQAPGQGLEWMGGIIPIFGTANYAQKFQGR |
| | | VTITADKSTSTAYMELSSLRSEDTAVYYCAREYYRGPY |
| | | DYWGQGTTVTVSSASTKGPSVFPLAPSSKSTSGGTAAL |
| | | GCLVKDYFPEPVTVSWNSGALTSGVHTFPAVLQSSGL |
| | | YSLSSVVTVPSSSLGTQTYICNVNHKPSNTKVDKKVEP |
| | | KSCDKTHTCPPCPAPEAAGGPSVFLFPPKPKDTLMISRT |
| | | PEVTCVVVDVSHEDPEVKFNWYVDGVEVHNAKTKPR |
| | | EEQYNSTYRVVSVLTVLHQDWLNGKEYKCKVSNKAL |
| | | GAPIEKTISKAKGQPREPQVYTLPPCRDELTKNQVSLW |
| | | CLVKGFYPSDIAVEWESNGQPENNYKTTPPVLDSDGSF |
| | | FLYSKLTVDKSRWQQGNVFSCSVMHEALHNHYTQKS |
| | | LSLSPGGGGGSGGGGSGGGGSGGGGSEIVLTQSPGTLS |
| | | LSPGERATLSCRASQSVTSSYLAWYQQKPGQAPRLLIN |
| | | VGSRRATGIPDRFSGSGSGTDFTLTISRLEPEDFAVYYC |
| | | QQGIMLPPTFGQGTKVEIK |
| 234 | HC 2 | QVQLVQSGAEVKKPGSSVKVSCKASGGTFSSYAISWV |
| | (49B4) | RQAPGQGLEWMGGIIPIFGTANYAQKFQGRVTITADKS |
| | VHCH1_VHCH1 Fc | TSTAYMELSSLRSEDTAVYYCAREYYRGPYDYWGQG |
| | hole VH (4B9) | TTVTVSSASTKGPSVFPLAPSSKSTSGGTAALGCLVKD |
| | | YFPEPVTVSWNSGALTSGVHTFPAVLQSSGLYSLSSVV |
| | | TVPSSSLGTQTYICNVNHKPSNTKVDKKVEPKSCDGG |
| | | GGSGGGGSQVQLVQSGAEVKKPGSSVKVSCKASGGTF |
| | | SSYAISWVRQAPGQGLEWMGGIIPIFGTANYAQKFQGR |
| | | VTITADKSTSTAYMELSSLRSEDTAVYYCAREYYRGPY |
| | | DYWGQGTTVTVSSASTKGPSVFPLAPSSKSTSGGTAAL |
| | | GCLVKDYFPEPVTVSWNSGALTSGVHTFPAVLQSSGL |
| | | YSLSSVVTVPSSSLGTQTYICNVNHKPSNTKVDKKVEP |
| | | KSCDKTHTCPPCPAPEAAGGPSVFLFPPKPKDTLMISRT |
| | | PEVTCVVVDVSHEDPEVKFNWYVDGVEVHNAKTKPR |
| | | EEQYNSTYRVVSVLTVLHQDWLNGKEYKCKVSNKAL |
| | | GAPIEKTISKAKGQPREPQVCTLPPSRDELTKNQVSLSC |
| | | AVKGFYPSDIAVEWESNGQPENNYKTTPPVLDSDGSFF |
| | | LVSKLTVDKSRWQQGNVFSCSVMHEALHNHYTQKSL |
| | | SLSPGGGGGSGGGGSGGGGSGGGGSEVQLLESGGGLV |
| | | QPGGSLRLSCAASGFTFSSYAMSWVRQAPGKGLEWVS |
| | | AIIGSGASTYYADSVKGRFTISRDNSKNTLYLQMNSLR |
| | | AEDTAVYYCAKGWFGGFNYWGQGTLVTVSS |

[0762] In addition, the base pair and amino acid sequences for a 4+1 anti-OX40, anti-FAP construct, that does not contain the P329G LALA mutations, can be found respectively in Table 32.

TABLE 32
cDNA and Amino acid sequences of mature bispecific tetravalent
anti-Ox40/monovalent anti-FAP huIgG1 wt kih antibody
(4 + 1 format) with anti-FAP VH fused to knob and anti-FAP
VL fused to hole chain

| SEQ ID | | |
|---|---|---|
| NO: | Description | Sequence |
| 155 | (49B4) VLCL-light | see Table 13 |
| | chain | |
| | (nucleotide sequence) | |
| 235 | HC 1 | CAGGTGCAATTGGTGCAGTCTGGGGCTGAGGTGAAG |
| | (49B4) | AAGCCTGGGTCCTCGGTGAAGGTCTCCTGCAAGGCC |
| | VHCH1_VHCH1 Fc wt | TCCGGAGGCACATTCAGCAGCTACGCTATAAGCTGG |
| | knob VH (4B9) | GTGCGACAGGCCCCTGGACAAGGGCTCGAGTGGAT |
| | (nucleotide sequence) | GGGAGGGATCATCCCTATCTTTGGTACAGCAAACTA |
| | | CGCACAGAAGTTCCAGGGCAGGGTCACCATTACTGC |
| | | AGACAAATCCACGAGCACAGCCTACATGGAGCTGA |
| | | GCAGCCTGAGATCTGAGGACACCGCCGTGTATTACT |
| | | GTGCGAGAGAATACTACCGTGGTCCGTACGACTACT |
| | | GGGGCCAAGGGACCACCGTGACCGTCTCCTCAGCTA |
| | | GCACAAAGGGACCTAGCGTGTTCCCCCTGGCCCCCA |
| | | GCAGCAAGTCTACATCTGGCGGAACAGCCGCCCTGG |
| | | GCTGCCTCGTGAAGGACTACTTTCCCGAGCCCGTGA |
| | | CCGTGTCCTGGAACTCTGGCGCTCTGACAAGCGGCG |
| | | TGCACACCTTTCCAGCCGTGCTGCAGAGCAGCGGCC |
| | | TGTACTCTCTGAGCAGCGTCGTGACAGTGCCCAGCA |
| | | GCTCTCTGGGCACCCAGACCTACATCTGCAACGTGA |
| | | ACCACAAGCCCAGCAACACCAAGGTGGACAAGAAG |
| | | GTGGAACCCAAGAGCTGCGACGGCGGAGGGGGATC |
| | | TGGCGGCGGAGGATCCCAGGTGCAATTGGTGCAGTC |
| | | TGGGGCTGAGGTGAAGAAGCCTGGGTCCTCGGTGAA |
| | | GGTCTCCTGCAAGGCCTCCGGAGGCACATTCAGCAG |
| | | CTACGCTATAAGCTGGGTGCGACAGGCCCCTGGACA |
| | | AGGGCTCGAGTGGATGGGAGGGATCATCCCTATCTT |
| | | TGGTACAGCAAACTACGCACAGAAGTTCCAGGGCA |
| | | GGGTCACCATTACTGCAGACAAATCCACGAGCACAG |
| | | CCTACATGGAGCTGAGCAGCCTGAGATCTGAGGACA |
| | | CCGCCGTGTATTACTGTGCGAGAGAATACTACCGTG |
| | | GTCCGTACGACTACTGGGGCCAAGGGACCACCGTGA |
| | | CCGTCTCCTCAGCTAGCACCAAGGGCCCATCGGTCT |
| | | TCCCCCTGGCACCCTCCTCCAAGAGCACCTCTGGGG |
| | | GCACAGCGGCCCTGGGCTGCCTGGTCAAGGACTACT |
| | | TCCCCGAACCGGTGACGGTGTCGTGGAACTCAGGCG |
| | | CCCTGACCAGCGGCGTGCACACCTTCCCGGCTGTCC |
| | | TACAGTCCTCAGGACTCTACTCCCTCAGCAGCGTGG |
| | | TGACCGTGCCCTCCAGCAGCTTGGGCACCCAGACCT |
| | | ACATCTGCAACGTGAATCACAAGCCCAGCAACACCA |
| | | AGGTGGACAAGAAAGTTGAGCCCAAATCTTGTGACA |
| | | AAACTCACACATGCCCACCGTGCCCAGCACCTGAAC |
| | | TCCTGGGGGGACCGTCAGTCTTCCTCTTCCCCCCAAA |
| | | ACCCAAGGACACCCTCATGATCTCCCGGACCCCTGA |
| | | GGTCACATGCGTGGTGGTGGACGTGAGCCACGAAG |
| | | ACCCTGAGGTCAAGTTCAACTGGTACGTGGACGGCG |
| | | TGGAGGTGCATAATGCCAAGACAAAGCCGCGGGAG |
| | | GAGCAGTACAACAGCACGTACCGTGTGGTCAGCGTC |
| | | CTCACCGTCCTGCACCAGGACTGGCTGAATGGCAAG |
| | | GAGTACAAGTGCAAGGTCTCCAACAAAGCCCTCCCA |
| | | GCCCCCATCGAGAAAACCATCTCCAAAGCCAAAGG |
| | | GCAGCCCCGAGAACCACAGGTGTACACCCTGCCCCC |
| | | CTGCAGAGATGAGCTGACCAAGAACCAGGTGTCCCT |
| | | GTGGTGTCTGGTCAAGGGCTTCTACCCCAGCGATAT |
| | | CGCCGTGGAGTGGGAGAGCAACGGCCAGCCTGAGA |
| | | ACAACTACAAGACCACCCCCCCTGTGCTGGACAGCG |
| | | ACGGCAGCTTCTTCCTGTACTCCAAACTGACCGTGG |
| | | ACAAGAGCCGGTGGCAGCAGGGCAACGTGTTCAGC |
| | | TGCAGCGTGATGCACGAGGCCCTGCACAACCACTAC |
| | | ACCCAGAAGTCCCTGAGCCTGAGCCCCGGCGGAGGC |
| | | GGCGGAAGCGGAGGAGGAGGATCTGGGGGCGGAGG |
| | | TTCCGGAGGCGGAGGATCCGAGGTGCAGCTGCTCGA |
| | | AAGCGGCGGAGGACTGGTGCAGCCTGGCGGCAGCC |
| | | TGAGACTGTCTTGCGCCGCCAGCGGCTTCACCTTCA |
| | | GCAGCTACGCCATGAGCTGGGTCCGCCAGGCCCCTG |
| | | GCAAGGGACTGGAATGGGTGTCCGCCATCATCGGCT |
| | | CTGGCGCCAGCACCTACTACGCCGACAGCGTGAAGG |
| | | GCCGGTTCACCATCAGCCGGGACAACAGCAAGAAC |
| | | ACCCTGTACCTGCAGATGAACAGCCTGCGGGCCGAG |
| | | GACACCGCCGTGTACTACTGCGCCAAGGGATGGTTC |
| | | GGCGGCTTCAACTACTGGGGACAGGGCACCCTGGTC |
| | | ACCGTGTCCAGC |
| 236 | HC 2 | CAGGTGCAATTGGTGCAGTCTGGGGCTGAGGTGAAG |
| | (49B4) | AAGCCTGGGTCCTCGGTGAAGGTCTCCTGCAAGGCC |
| | VHCH1_VHCH1 Fc wt | TCCGGAGGCACATTCAGCAGCTACGCTATAAGCTGG |
| | hole VL (4B9) | GTGCGACAGGCCCCTGGACAAGGGCTCGAGTGGAT |
| | (nucleotide sequence) | GGGAGGGATCATCCCTATCTTTGGTACAGCAAACTA |
| | | CGCACAGAAGTTCCAGGGCAGGGTCACCATTACTGC |
| | | AGACAAATCCACGAGCACAGCCTACATGGAGCTGA |
| | | GCAGCCTGAGATCTGAGGACACCGCCGTGTATTACT |
| | | GTGCGAGAGAATACTACCGTGGTCCGTACGACTACT |
| | | GGGGCCAAGGGACCACCGTGACCGTCTCCTCAGCTA |
| | | GCACAAAGGGACCTAGCGTGTTCCCCCTGGCCCCCA |
| | | GCAGCAAGTCTACATCTGGCGGAACAGCCGCCCTGG |
| | | GCTGCCTCGTGAAGGACTACTTTCCCGAGCCCGTGA |
| | | CCGTGTCCTGGAACTCTGGCGCTCTGACAAGCGGCG |
| | | TGCACACCTTTCCAGCCGTGCTGCAGAGCAGCGGCC |
| | | TGTACTCTCTGAGCAGCGTCGTGACAGTGCCCAGCA |
| | | GCTCTCTGGGCACCCAGACCTACATCTGCAACGTGA |
| | | ACCACAAGCCCAGCAACACCAAGGTGGACAAGAAG |
| | | GTGGAACCCAAGAGCTGCGACGGCGGAGGGGGATC |
| | | TGGCGGCGGAGGATCCCAGGTGCAATTGGTGCAGTC |
| | | TGGGGCTGAGGTGAAGAAGCCTGGGTCCTCGGTGAA |
| | | GGTCTCCTGCAAGGCCTCCGGAGGCACATTCAGCAG |
| | | CTACGCTATAAGCTGGGTGCGACAGGCCCCTGGACA |
| | | AGGGCTCGAGTGGATGGGAGGGATCATCCCTATCTT |
| | | TGGTACAGCAAACTACGCACAGAAGTTCCAGGGCA |
| | | GGGTCACCATTACTGCAGACAAATCCACGAGCACAG |
| | | CCTACATGGAGCTGAGCAGCCTGAGATCTGAGGACA |
| | | CCGCCGTGTATTACTGTGCGAGAGAATACTACCGTG |
| | | GTCCGTACGACTACTGGGGCCAAGGGACCACCGTGA |
| | | CCGTCTCCTCAGCTAGCACCAAGGGCCCATCGGTCT |
| | | TCCCCCTGGCACCCTCCTCCAAGAGCACCTCTGGGG |
| | | GCACAGCGGCCCTGGGCTGCCTGGTCAAGGACTACT |
| | | TCCCCGAACCGGTGACGGTGTCGTGGAACTCAGGCG |
| | | CCCTGACCAGCGGCGTGCACACCTTCCCGGCTGTCC |
| | | TACAGTCCTCAGGACTCTACTCCCTCAGCAGCGTGG |
| | | TGACCGTGCCCTCCAGCAGCTTGGGCACCCAGACCT |
| | | ACATCTGCAACGTGAATCACAAGCCCAGCAACACCA |
| | | AGGTGGACAAGAAAGTTGAGCCCAAATCTTGTGACA |
| | | AAACTCACACATGCCCACCGTGCCCAGCACCTGAAC |
| | | TCCTGGGGGGACCGTCAGTCTTCCTCTTCCCCCCAAA |
| | | ACCCAAGGACACCCTCATGATCTCCCGGACCCCTGA |
| | | GGTCACATGCGTGGTGGTGGACGTGAGCCACGAAG |
| | | ACCCTGAGGTCAAGTTCAACTGGTACGTGGACGGCG |
| | | TGGAGGTGCATAATGCCAAGACAAAGCCGCGGGAG |
| | | GAGCAGTACAACAGCACGTACCGTGTGGTCAGCGTC |
| | | CTCACCGTCCTGCACCAGGACTGGCTGAATGGCAAG |
| | | GAGTACAAGTGCAAGGTCTCCAACAAAGCCCTCCCA |
| | | GCCCCCATCGAGAAAACCATCTCCAAAGCCAAAGG |
| | | GCAGCCCCGAGAACCACAGGTGTGCACCCTGCCCCC |
| | | ATCCCGGGATGAGCTGACCAAGAACCAGGTCAGCCT |
| | | CTCGTGCGCAGTCAAAGGCTTCTATCCCAGCGACAT |
| | | CGCCGTGGAGTGGGAGAGCAATGGGCAGCCGGAGA |
| | | ACAACTACAAGACCACGCCTCCCGTGCTGGACTCCG |
| | | ACGGCTCCTTCTTCCTCGTGAGCAAGCTCACCGTGG |
| | | ACAAGAGCAGGTGGCAGCAGGGGAACGTCTTCTCAT |
| | | GCTCCGTGATGCATGAGGCTCTGCACAACCACTACA |
| | | CGCAGAAGAGCCTCTCCCTGTCTCCGGGTGGAGGCG |
| | | GCGGAAGCGGAGGAGGAGGATCCGGCGGCGGAGGT |
| | | TCCGGAGGCGGTGGATCTGAGATCGTGCTGACCCAG |
| | | TCTCCCGGCACCCTGTCTCTGAGCCCTGGCGAGAGA |
| | | GCCACCCTGTCCTGCAGAGCCTCCCAGTCCGTGACC |
| | | TCCTCCTACCTCGCCTGGTATCAGCAGAAGCCCGGC |
| | | CAGGCCCCTCGGCTGCTGATCAACGTGGGCAGTCGG |
| | | AGAGCCACCGGCATCCCTGACCGGTTCTCCGGCTCT |
| | | GGCTCCGGCACCGACTTCACCCTGACCATCTCCCGG |
| | | CTGGAACCCGAGGACTTCGCCGTGTACTACTGCCAG |
| | | CAGGGCATCATGCTGCCCCCCACCTTTGGCCAGGGC |
| | | ACCAAGGTGGAAATCAAG |
| 157 | (49B4) VLCL-light | see Table 13 |
| | chain | |
| 237 | HC 1 | QVQLVQSGAEVKKPGSSVKVSCKASGGTFSSYAISWV |
| | (49B4) | RQAPGQGLEWMGGIIPIFGTANYAQKFQGRVTITADKS |
| | VHCH1_VHCH1 Fc wt | TSTAYMELSSLRSEDTAVYYCAREYYRGPYDYWGQG |
| | knob VH (4B9) | TTVTVSSASTKGPSVFPLAPSSKSTSGGTAALGCLVKD |
| | | YFPEPVTVSWNSGALTSGVHTFPAVLQSSGLYSLSSVV |
| | | TVPSSSLGTQTYICNVNHKPSNTKVDKKVEPKSCDGG |
| | | GGSGGGGSQVQLVQSGAEVKKPGSSVKVSCKASGGTF |
| | | SSYAISWVRQAPGQGLEWMGGIIPIFGTANYAQKFQGR |
| | | VTITADKSTSTAYMELSSLRSEDTAVYYCAREYYRGPY |
| | | DYWGQGTTVTVSSASTKGPSVFPLAPSSKSTSGGTAAL |
| | | GCLVKDYFPEPVTVSWNSGALTSGVHTFPAVLQSSGL |
| | | YSLSSVVTVPSSSLGTQTYICNVNHKPSNTKVDKKVEP |
| | | KSCDKTHTCPPCPAPELLGGPSVFLFPPKPKDTLMISRT |
| | | PEVTCVVVDVSHEDPEVKFNWYVDGVEVHNAKTKPR |
| | | EEQYNSTYRVVSVLTVLHQDWLNGKEYKCKVSNKAL |
| | | PAPIEKTISKAKGQPREPQVYTLPPCRDELTKNQVSLW |
| | | CLVKGFYPSDIAVEWESNGQPENNYKTTPPVLDSDGSF |
| | | FLYSKLTVDKSRWQQGNVFSCSVMHEALHNHYTQKS |
| | | LSLSPGGGGGSGGGGSGGGGSGGGGSEVQLLESGGGL |
| | | VQPGGSLRLSCAASGFTFSSYAMSWVRQAPGKGLEW |
| | | VSAIIGSGASTYYADSVKGRFTISRDNSKNTLYLQMNS |
| | | LRAEDTAVYYCAKGWFGGFNYWGQGTLVTVSS |
| 238 | HC 2 | QVQLVQSGAEVKKPGSSVKVSCKASGGTFSSYAISWV |
| | (49B4) | RQAPGQGLEWMGGIIPIFGTANYAQKFQGRVTITADKS |
| | VHCH1_VHCH1 Fc wt | TSTAYMELSSLRSEDTAVYYCAREYYRGPYDYWGQG |
| | hole VL (4B9) | TTVTVSSASTKGPSVFPLAPSSKSTSGGTAALGCLVKD |
| | | YFPEPVTVSWNSGALTSGVHTFPAVLQSSGLYSLSSVV |
| | | TVPSSSLGTQTYICNVNHKPSNTKVDKKVEPKSCDGG |
| | | GGSGGGGSQVQLVQSGAEVKKPGSSVKVSCKASGGTF |
| | | SSYAISWVRQAPGQGLEWMGGIIPIFGTANYAQKFQGR |
| | | VTITADKSTSTAYMELSSLRSEDTAVYYCAREYYRGPY |
| | | DYWGQGTTVTVSSASTKGPSVFPLAPSSKSTSGGTAAL |
| | | GCLVKDYFPEPVTVSWNSGALTSGVHTFPAVLQSSGL |
| | | YSLSSVVTVPSSSLGTQTYICNVNHKPSNTKVDKKVEP |
| | | KSCDKTHTCPPCPAPELLGGPSVFLFPPKPKDTLMISRT |
| | | PEVTCVVVDVSHEDPEVKFNWYVDGVEVHNAKTKPR |
| | | EEQYNSTYRVVSVLTVLHQDWLNGKEYKCKVSNKAL |
| | | PAPIEKTISKAKGQPREPQVCTLPPSRDELTKNQVSLSC |
| | | AVKGFYPSDIAVEWESNGQPENNYKTTPPVLDSDGSFF |
| | | LVSKLTVDKSRWQQGNVFSCSVMHEALHNHYTQKSL |
| | | SLSPGGGGGSGGGGSGGGGSGGGGSEIVLTQSPGTLSL |
| | | SPGERATLSCRASQSVTSSYLAWYQQKPGQAPRLLINV |
| | | GSRRATGIPDRFSGSGSGTDFTLTISRLEPEDFAVYYCQ |
| | | QGIMLPPTFGQGTKVEIK |

[0763] All genes were transiently expressed under control of a chimeric MPSV promoter consisting of the MPSV core promoter combined with the CMV promoter enhancer fragment. The expression vector also contains the oriP region for episomal replication in EBNA (Epstein Barr Virus Nuclear Antigen) containing host cells.

[0764] The bispecific anti-Ox40/anti-FAP 4+1 constructs were produced by co-transfecting HEK293-EBNA cells with the mammalian expression vectors using polyethylenimine (PEI; Polysciences Inc.). The cells were transfected with the corresponding expression vectors in a 1:1:4 ratio (“vector HCl”:“vector HC2”:“vector LC”).

[0765] For a 200 mL production in 500 mL shake flasks, 250 million HEK293 EBNA cells were seeded 24 hours before transfection in Excell media (Sigma) with supplements. For transfection, the cells were centrifuged for 5 minutes at 210×g, and supernatant was replaced by pre-warmed CD-CHO medium (Gibco). Expression vectors were mixed in 20 mL CD-CHO medium to a final amount of 200 μg DNA. After addition of 540 μL PEI (1 mg/mL) (Polysciences Inc.), the solution was vortexed for 15 seconds and incubated for 10 minutes at room temperature. Afterwards, cells were mixed with the DNA/PEI solution, transferred to a 500 mL shake flask and incubated for 3 hours at 37° C. in an incubator with a 5% CO₂ atmosphere and shaking at 165 rpm. After the incubation, 160 mL Excell medium with supplements (1 mM valproic acid, 5 g/l PepSoy, 6 mM L-Glutamine) was added and cells were cultured for 24 hours. 24 h after transfection the cells were supplemented with an amino acid and glucose feed at 12% final volume (24 mL) and 3 g/L glucose (1.2 mL from 500 g/L stock). After culturing for 7 days, the cell supernatant was collected by centrifugation for 45 minutes at 2000-3000×g. The solution was sterile filtered (0.22 μm filter), supplemented with sodium azide to a final concentration of 0.01% (w/v), and kept at 4° C.

[0766] Purification of the bispecific constructs from cell culture supernatants was carried out by affinity chromatography using MabSelectSure. The protein was concentrated and filtered prior to loading on a HiLoad Superdex 200 column (GE Healthcare) equilibrated with 20 mM histidine, 140 mM NaCl, 0.01% Tween-20 solution of pH 6.0.

[0767] For affinity chromatography, the supernatant was loaded on a ProtA MabSelect Sure column (CV=5 mL, GE Healthcare) equilibrated with 30 mL 20 mM Sodium Citrate, 20 mM Sodium Phosphate, pH 7.5. Unbound protein was removed by washing with 6-10 column volumes of a buffer containing 20 mM sodium phosphate, 20 mM sodium citrate (pH 7.5). The bound protein was eluted using either a step or a linear pH-gradient of 15 CVs (from 0 to 100%) of 20 mM Sodium Citrate, 100 mM Sodium Chloride, 100 mM Glycine, 0.01% (v/v) Tween-20, pH 3.0. The column was then washed with 10 column volumes of a solution containing 20 mM Sodium Citrate, 100 mM sodium chloride, 100 mM glycine, 0.01% (v/v) Tween-20, pH 3.0 followed by a re-equilibration step.

[0768] The pH of the collected fractions was adjusted by adding 1/10 (v/v) of 0.5 M sodium phosphate, pH8.0. The protein was concentrated and filtered prior to loading on a HiLoad Superdex 200 column (GE Healthcare) equilibrated with 20 mM histidine, 140 mM sodium chloride, pH 6.0, 0.01% Tween20.

[0769] The protein concentration of purified bispecific constructs was determined by measuring the OD at 280 nm, using the molar extinction coefficient calculated on the basis of the amino acid sequence. Purity and molecular weight of the bispecific constructs were analyzed by CE-SDS in the presence and absence of a reducing agent (Invitrogen) using a LabChipGXII (Caliper). The aggregate content of bispecific constructs was analyzed using a TSKgel G3000 SW XL analytical size-exclusion column (Tosoh) equilibrated in a 25 mM potassium phosphate, 125 mM sodium chloride, 200 mM L-arginine monohydrochloride, 0.02% (w/v) NaN₃, pH 6.7 running buffer at 25° C. (Table 31).

TABLE 33
Biochemical analysis of exemplary bispecific, tetravalent anti-Ox40/anti-FAP IgG1
P329G LALA antigen binding molecules (4 + 1 constructs)

| | Yield | Monomer | CE-SDS | | CE-SDS | |
|---|---|---|---|---|---|---|
| Clone | [mg/l] | [%] | (non red) | | (red) | |
| OX40(49B4)/FAP(28H1) | 10.24 | 99.14 | 96.95% | (269 kDa) | 0.46% | (136.4 kDa) |
| P329GLALA IgG1 4 + 1 | | 0.86% | 1.61% | (261.3 kDa) | 54.4% | (103.7 kDa) |
| | | HMW | 0.23% | (253 kDa) | 0.34% | (77.6 kDa) |
| | | | 0.47% | (224 kDa) | 3.03% | (30.8 kDa) |
| | | | 0.73% | (32 kDa) | 41.74% | (28 kDa) |
| OX40(49B4)/FAP(4B9) | 9.22 | 100 | 95.3% | (264.2 kDa) | 0.29% | (144.9 kDa) |
| P329GLALA IgG1 4 + 1 | | | 3.04% | (258.8 kDa) | 58.53% | (104.9 kDa) |
| | | | 0.56% | (253 kDa) | 1.05% | (31.6 kDa) |
| | | | 0.33% | (225.8 kDa) | 40.14 | (29.15 kDa) |
| | | | 0.04% | (192 kDa) | | |
| | | | 0.22% | (155.8 kDa) | | |
| | | | 0.5% | (33.4 kDa) | | |
| OX40(49B4)/DP47 | 30.88 | 98.29% | 100% | (266.9 kDa) | 52.43% | (105 kDa) |
| P329GLALA IgG1 4 + 1 | | 1.71% | | | 0.53% | (30.9 kDa) |
| | | HMW | | | 47.04% | (28.4 kDa) |

### 4.5 Generation of Bispecific Tetravalent Antigen Binding Molecules Targeting OX40 and Fibroblast Activation Protein (FAP) (4+2 Format)

[0770] Bispecific agonistic OX40 antibodies with tetravalent binding for OX40 and with bivalent binding for FAP were prepared. The crossmab technology in accordance with International patent application No. WO 2010/145792 A1 was applied to reduce the formation of wrongly paired light chains.

[0771] The generation and preparation of the FAP binders is described in WO 2012/020006 A2, which is incorporated herein by reference.

[0772] In this example, a crossed Fab unit (VLCH) of the FAP binder 28H1 was fused to the C-terminus of the Fc part of both heavy chains. Two Fabs against OX40 were fused to the N-terminus of each heavy chain as described in Example 4.3. The CH and CL of the anti-OX40 Fabs contained amino acid mutations (so-called charged residues) in the CH1 domain (K147E, K213E, numbering according Kabat EU index) and the CL of the anti-OX40 binder 49B4 (E123R and Q124K, numbering according to Kabat EU index) to prevent the generation of Bence Jones proteins and to further stabilize the correct pairing of the light chains. In this case the introduction of a knob into hole was not necessary as both heavy chains contained the same domains.

[0773] The Pro329Gly, Leu234Ala and Leu235Ala mutations were introduced in the constant region of the heavy chains to abrogate binding to Fc gamma receptors according to the method described in International Patent Appl. Publ. No. WO 2012/130831 A1. The resulting bispecific, tetravalent construct is depicted in FIG. 16B.

[0774] Table 34 shows, respectively, the nucleotide and amino acid sequences of mature bispecific, tetravalent anti-OX40/anti-FAP human IgG1 P329GLALA antibodies.

[0775] In addition, an “untargeted” 4+2 construct was prepared, wherein the Fab domains of the anti-FAP binder were replaced by Fab domain of a germline control, termed DP47, not binding to the antigen.

TABLE 34
Sequences of bispecific, tetravalent anti-OX40/anti-FAP
human IgG1 P329GLALA antigen binding molecules
(4 + 2 format)

| SEQ ID | | |
|---|---|---|
| NO: | Description | Sequence |
| 223 | (49B4) VLCL*- | GACATCCAGATGACCCAGTCTCCTTCCACCCTGTCTGC |
| | light chain 1 | ATCTGTAGGAGACCGTGTCACCATCACTTGCCGTGCCA |
| | *E123R/Q124K | GTCAGAGTATTAGTAGCTGGTTGGCCTGGTATCAGCAG |
| | (nucleotide | AAACCAGGGAAAGCCCCTAAGCTCCTGATCTATGATGC |
| | sequence) | CTCCAGTTTGGAAAGTGGGGTCCCATCACGTTTCAGCG |
| | | GCAGTGGATCCGGGACAGAATTCACTCTCACCATCAGC |
| | | AGCTTGCAGCCTGATGATTTTGCAACTTATTACTGCCA |
| | | ACAGTATAGTTCGCAGCCGTATACGTTTGGCCAGGGCA |
| | | CCAAAGTCGAGATCAAGCGTACGGTGGCTGCACCATCT |
| | | GTCTTCATCTTCCCGCCATCTGATCGGAAGTTGAAATCT |
| | | GGAACTGCCTCTGTTGTGTGCCTGCTGAATAACTTCTAT |
| | | CCCAGAGAGGCCAAAGTACAGTGGAAGGTGGATAACG |
| | | CCCTCCAATCGGGTAACTCCCAGGAGAGTGTCACAGAG |
| | | CAGGACAGCAAGGACAGCACCTACAGCCTCAGCAGCA |
| | | CCCTGACGCTGAGCAAAGCAGACTACGAGAAACACAA |
| | | AGTCTACGCCTGCGAAGTCACCCATCAGGGCCTGAGCT |
| | | CGCCCGTCACAAAGAGCTTCAACAGGGGAGAGTGT |
| 224 | heavy chain | CAGGTGCAGCTGGTGCAGTCTGGCGCCGAAGTGAAGA |
| | (49B4) | AACCCGGCAGCAGCGTGAAGGTGTCCTGCAAGGCTTCC |
| | VHCH1*_VHCH1* | GGCGGCACCTTCAGCAGCTACGCCATTTCTTGGGTGCG |
| | Fc knob VLCH1 | CCAGGCCCCTGGACAGGGCCTGGAATGGATGGGCGGC |
| | (28H1) | ATCATCCCCATCTTCGGCACCGCCAACTACGCCCAGAA |
| | *K147E/K213E | ATTCCAGGGCAGAGTGACCATCACCGCCGACAAGAGC |
| | (nucleotide | ACCAGCACCGCCTACATGGAACTGAGCAGCCTGCGGA |
| | sequence) | GCGAGGACACCGCCGTGTACTACTGCGCCAGAGAGTA |
| | | CTACAGAGGCCCCTACGACTACTGGGGCCAGGGCACA |
| | | ACCGTGACCGTGTCTAGCGCCAGCACAAAGGGCCCCA |
| | | GCGTGTTCCCTCTGGCCCCTAGCAGCAAGAGCACATCT |
| | | GGCGGAACAGCCGCCCTGGGCTGCCTGGTGGAAGATT |
| | | ACTTCCCCGAGCCCGTGACAGTGTCCTGGAACTCTGGC |
| | | GCCCTGACAAGCGGCGTGCACACCTTTCCAGCCGTGCT |
| | | GCAGAGCAGCGGCCTGTACTCACTGTCCAGCGTCGTGA |
| | | CTGTGCCCAGCAGCAGCCTGGGAACCCAGACCTACATC |
| | | TGCAACGTGAACCACAAGCCCAGCAACACCAAGGTGG |
| | | ACGAGAAGGTGGAACCCAAGAGCTGCGACGGCGGAGG |
| | | CGGATCTGGCGGCGGAGGATCCCAGGTGCAGCTGGTG |
| | | CAGAGCGGAGCTGAAGTGAAAAAGCCTGGCTCCTCCG |
| | | TGAAAGTGTCTTGTAAAGCCAGCGGCGGCACATTCTCA |
| | | TCCTACGCCATCAGCTGGGTGCGGCAGGCTCCAGGCCA |
| | | GGGACTGGAATGGATGGGAGGAATTATCCCTATTTTTG |
| | | GGACAGCCAATTATGCTCAGAAATTTCAGGGGCGCGTG |
| | | ACAATTACAGCCGACAAGTCCACCTCTACAGCTTATAT |
| | | GGAACTGTCCTCCCTGCGCTCCGAGGATACAGCTGTGT |
| | | ATTATTGTGCCCGCGAGTACTACCGGGGACCTTACGAT |
| | | TATTGGGGACAGGGAACCACAGTGACTGTGTCCTCCGC |
| | | TAGCACCAAGGGACCTTCCGTGTTTCCCCTGGCTCCCA |
| | | GCTCCAAGTCTACCTCTGGGGGCACAGCTGCTCTGGGA |
| | | TGTCTGGTGGAAGATTATTTTCCTGAACCTGTGACCGT |
| | | GTCATGGAACAGCGGAGCCCTGACCTCCGGGGTGCAC |
| | | ACATTCCCTGCTGTGCTGCAGTCCTCCGGCCTGTATAGC |
| | | CTGAGCAGCGTCGTGACCGTGCCTTCCAGCTCTCTGGG |
| | | CACACAGACATATATCTGTAATGTGAATCACAAACCCT |
| | | CTAATACCAAAGTGGATGAGAAAGTGGAACCTAAGTC |
| | | CTGCGACAAGACCCACACCTGTCCCCCTTGTCCTGCCC |
| | | CTGAAGCTGCTGGCGGCCCATCTGTGTTTCTGTTCCCCC |
| | | CAAAGCCCAAGGACACCCTGATGATCAGCCGGACCCC |
| | | CGAAGTGACCTGCGTGGTGGTGGATGTGTCCCACGAGG |
| | | ACCCAGAAGTGAAGTTCAATTGGTACGTGGACGGCGTG |
| | | GAAGTGCACAACGCCAAGACCAAGCCGCGGGAAGAAC |
| | | AGTACAACAGCACCTACCGGGTGGTGTCCGTGCTGACA |
| | | GTGCTGCACCAGGACTGGCTGAACGGCAAAGAGTACA |
| | | AGTGCAAGGTGTCCAACAAGGCCCTGGGAGCCCCCATC |
| | | GAGAAAACCATCAGCAAGGCCAAGGGCCAGCCCCGCG |
| | | AACCTCAGGTGTACACCCTGCCCCCAAGCAGGGACGA |
| | | GCTGACCAAGAACCAGGTGTCCCTGACCTGTCTCGTGA |
| | | AGGGCTTCTACCCCTCCGATATCGCCGTGGAATGGGAG |
| | | AGCAACGGCCAGCCCGAGAACAACTACAAGACCACCC |
| | | CCCCTGTGCTGGACAGCGACGGCTCATTCTTCCTGTACT |
| | | CCAAGCTGACCGTGGACAAGAGCCGGTGGCAGCAGGG |
| | | CAACGTGTTCAGCTGCAGCGTGATGCACGAGGCCCTGC |
| | | ACAACCACTACACACAGAAGTCTCTGAGCCTGAGCCCT |
| | | GGCGGAGGGGGAGGATCTGGGGGAGGCGGAAGTGGG |
| | | GGAGGGGGTTCCGGAGGCGGCGGATCAGAAATTGTGC |
| | | TGACCCAGTCCCCCGGCACCCTGTCACTGTCTCCAGGC |
| | | GAAAGAGCCACCCTGAGCTGTAGGGCCTCCCAGAGCG |
| | | TGTCCAGAAGCTATCTGGCCTGGTATCAGCAGAAGCCC |
| | | GGACAGGCCCCCAGACTGCTGATCATTGGCGCCTCTAC |
| | | CAGAGCCACCGGCATCCCCGATAGATTCAGCGGCTCTG |
| | | GCAGCGGCACCGACTTCACCCTGACCATCTCCAGACTG |
| | | GAACCCGAGGACTTTGCCGTGTACTATTGCCAGCAGGG |
| | | CCAAGTGATCCCCCCCACCTTTGGCCAGGGAACAAAGG |
| | | TGGAAATCAAGTCCAGCGCTTCCACCAAGGGCCCCTCA |
| | | GTGTTCCCACTGGCACCATCCAGCAAGTCCACAAGCGG |
| | | AGGAACCGCCGCTCTGGGCTGTCTCGTGAAAGACTACT |
| | | TTCCAGAGCCAGTGACCGTGTCCTGGAATAGTGGCGCT |
| | | CTGACTTCTGGCGTGCACACTTTCCCCGCAGTGCTGCA |
| | | GAGTTCTGGCCTGTACTCCCTGAGTAGCGTCGTGACAG |
| | | TGCCCTCCTCTAGCCTGGGCACTCAGACTTACATCTGC |
| | | AATGTGAATCATAAGCCTTCCAACACAAAAGTGGACA |
| | | AAAAAGTGGAACCCAAATCTTGC |
| 225 | (28H1) VHCL- | GAAGTGCAGCTGCTGGAATCCGGCGGAGGCCTGGTGC |
| | light chain 2 | AGCCTGGCGGATCTCTGAGACTGTCCTGCGCCGCCTCC |
| | (nucleotide | GGCTTCACCTTCTCCTCCCACGCCATGTCCTGGGTCCGA |
| | sequence) | CAGGCTCCTGGCAAAGGCCTGGAATGGGTGTCCGCCAT |
| | | CTGGGCCTCCGGCGAGCAGTACTACGCCGACTCTGTGA |
| | | AGGGCCGGTTCACCATCTCCCGGGACAACTCCAAGAAC |
| | | ACCCTGTACCTGCAGATGAACTCCCTGCGGGCCGAGGA |
| | | CACCGCCGTGTACTACTGTGCCAAGGGCTGGCTGGGCA |
| | | ACTTCGACTACTGGGGACAGGGCACCCTGGTCACCGTG |
| | | TCCAGCGCTAGCGTGGCCGCTCCCTCCGTGTTCATCTTC |
| | | CCACCTTCCGACGAGCAGCTGAAGTCCGGCACCGCTTC |
| | | TGTCGTGTGCCTGCTGAACAACTTCTACCCCCGCGAGG |
| | | CCAAGGTGCAGTGGAAGGTGGACAACGCCCTGCAGTC |
| | | CGGCAACAGCCAGGAATCCGTGACCGAGCAGGACTCC |
| | | AAGGACAGCACCTACTCCCTGTCCTCCACCCTGACCCT |
| | | GTCCAAGGCCGACTACGAGAAGCACAAGGTGTACGCC |
| | | TGCGAAGTGACCCACCAGGGCCTGTCTAGCCCCGTGAC |
| | | CAAGTCTTTCAACCGGGGCGAGTGC |
| 226 | (49B4) VLCL*- | DIQMTQSPSTLSASVGDRVTITCRASQSISSWLAWYQQKP |
| | light chain 1 | GKAPKLLIYDASSLESGVPSRFSGSGSGTEFTLTISSLQPDD |
| | *E123R/Q124K | FATYYCQQYSSQPYTFGQGTKVEIKRTVAAPSVFIFPPSDR |
| | | KLKSGTASVVCLLNNFYPREAKVQWKVDNALQSGNSQE |
| | | SVTEQDSKDSTYSLSSTLTLSKADYEKHKVYACEVTHQG |
| | | LSSPVTKSFNRGEC |
| 227 | heavy chain | QVQLVQSGAEVKKPGSSVKVSCKASGGTFSSYAISWVRQ |
| | (49B4) | APGQGLEWMGGIIPIFGTANYAQKFQGRVTITADKSTSTA |
| | VHCH1*_VHCH1* | YMELSSLRSEDTAVYYCAREYYRGPYDYWGQGTTVTVS |
| | Fc knob VLCH1 | SASTKGPSVFPLAPSSKSTSGGTAALGCLVEDYFPEPVTVS |
| | (28H1) | WNSGALTSGVHTFPAVLQSSGLYSLSSVVTVPSSSLGTQT |
| | *K147E/K213E | YICNVNHKPSNTKVDEKVEPKSCDGGGGSGGGGSQVQL |
| | | VQSGAEVKKPGSSVKVSCKASGGTFSSYAISWVRQAPGQ |
| | | GLEWMGGIIPIFGTANYAQKFQGRVTITADKSTSTAYMEL |
| | | SSLRSEDTAVYYCAREYYRGPYDYWGQGTTVTVSSASTK |
| | | GPSVFPLAPSSKSTSGGTAALGCLVEDYFPEPVTVSWNSG |
| | | ALTSGVHTFPAVLQSSGLYSLSSVVTVPSSSLGTQTYICNV |
| | | NHKPSNTKVDEKVEPKSCDKTHTCPPCPAPEAAGGPSVFL |
| | | FPPKPKDTLMISRTPEVTCVVVDVSHEDPEVKFNWYVDG |
| | | VEVHNAKTKPREEQYNSTYRVVSVLTVLHQDWLNGKEY |
| | | KCKVSNKALGAPIEKTISKAKGQPREPQVYTLPPSRDELT |
| | | KNQVSLTCLVKGFYPSDIAVEWESNGQPENNYKTTPPVL |
| | | DSDGSFFLYSKLTVDKSRWQQGNVFSCSVMHEALHNHY |
| | | TQKSLSLSPGGGGGSGGGGSGGGGSGGGGSEIVLTQSPGT |
| | | LSLSPGERATLSCRASQSVSRSYLAWYQQKPGQAPRLLII |
| | | GASTRATGIPDRFSGSGSGTDFTLTISRLEPEDFAVYYCQQ |
| | | GQVIPPTFGQGTKVEIKSSASTKGPSVFPLAPSSKSTSGGT |
| | | AALGCLVKDYFPEPVTVSWNSGALTSGVHTFPAVLQSSG |
| | | LYSLSSVVTVPSSSLGTQTYICNVNHKPSNTKVDKKVEPK |
| | | SC |
| 228 | (28H1) VHCL- | EVQLLESGGGLVQPGGSLRLSCAASGFTFSSHAMSWVRQ |
| | light chain 2 | APGKGLEWVSAIWASGEQYYADSVKGRFTISRDNSKNTL |
| | | YLQMNSLRAEDTAVYYCAKGWLGNFDYWGQGTLVTVS |
| | | SASVAAPSVFIFPPSDEQLKSGTASVVCLLNNFYPREAKV |
| | | QWKVDNALQSGNSQESVTEQDSKDSTYSLSSTLTLSKAD |
| | | YEKHKVYACEVTHQGLSSPVTKSFNRGEC |
| 223 | (49B4) VLCL*- | see above |
| | light chain 1 | |
| | *E123R/Q124K | |
| | (nucleotide | |
| | sequence) | |
| 229 | heavy chain | CAGGTGCAGCTGGTGCAGTCTGGCGCCGAAGTGAAGA |
| | (49B4) | AACCCGGCAGCAGCGTGAAGGTGTCCTGCAAGGCTTCC |
| | VHCH1*_VHCH1* | GGCGGCACCTTCAGCAGCTACGCCATTTCTTGGGTGCG |
| | Fc knob VLCH1 | CCAGGCCCCTGGACAGGGCCTGGAATGGATGGGCGGC |
| | (DP47) | ATCATCCCCATCTTCGGCACCGCCAACTACGCCCAGAA |
| | *K147E/K213E | ATTCCAGGGCAGAGTGACCATCACCGCCGACAAGAGC |
| | (nucleotide | ACCAGCACCGCCTACATGGAACTGAGCAGCCTGCGGA |
| | sequence) | GCGAGGACACCGCCGTGTACTACTGCGCCAGAGAGTA |
| | | CTACAGAGGCCCCTACGACTACTGGGGCCAGGGCACA |
| | | ACCGTGACCGTGTCTAGCGCCAGCACAAAGGGCCCCA |
| | | GCGTGTTCCCTCTGGCCCCTAGCAGCAAGAGCACATCT |
| | | GGCGGAACAGCCGCCCTGGGCTGCCTGGTGGAAGATT |
| | | ACTTCCCCGAGCCCGTGACAGTGTCCTGGAACTCTGGC |
| | | GCCCTGACAAGCGGCGTGCACACCTTTCCAGCCGTGCT |
| | | GCAGAGCAGCGGCCTGTACTCACTGTCCAGCGTCGTGA |
| | | CTGTGCCCAGCAGCAGCCTGGGAACCCAGACCTACATC |
| | | TGCAACGTGAACCACAAGCCCAGCAACACCAAGGTGG |
| | | ACGAGAAGGTGGAACCCAAGAGCTGCGACGGCGGAGG |
| | | CGGATCTGGCGGCGGAGGATCCCAGGTGCAGCTGGTG |
| | | CAGAGCGGAGCTGAAGTGAAAAAGCCTGGCTCCTCCG |
| | | TGAAAGTGTCTTGTAAAGCCAGCGGCGGCACATTCTCA |
| | | TCCTACGCCATCAGCTGGGTGCGGCAGGCTCCAGGCCA |
| | | GGGACTGGAATGGATGGGAGGAATTATCCCTATTTTTG |
| | | GGACAGCCAATTATGCTCAGAAATTTCAGGGGCGCGTG |
| | | ACAATTACAGCCGACAAGTCCACCTCTACAGCTTATAT |
| | | GGAACTGTCCTCCCTGCGCTCCGAGGATACAGCTGTGT |
| | | ATTATTGTGCCCGCGAGTACTACCGGGGACCTTACGAT |
| | | TATTGGGGACAGGGAACCACAGTGACTGTGTCCTCCGC |
| | | TAGCACCAAGGGACCTTCCGTGTTTCCCCTGGCTCCCA |
| | | GCTCCAAGTCTACCTCTGGGGGCACAGCTGCTCTGGGA |
| | | TGTCTGGTGGAAGATTATTTTCCTGAACCTGTGACCGT |
| | | GTCATGGAACAGCGGAGCCCTGACCTCCGGGGTGCAC |
| | | ACATTCCCTGCTGTGCTGCAGTCCTCCGGCCTGTATAGC |
| | | CTGAGCAGCGTCGTGACCGTGCCTTCCAGCTCTCTGGG |
| | | CACACAGACATATATCTGTAATGTGAATCACAAACCCT |
| | | CTAATACCAAAGTGGATGAGAAAGTGGAACCTAAGTC |
| | | CTGCGACAAGACCCACACCTGTCCCCCTTGTCCTGCCC |
| | | CTGAAGCTGCTGGCGGCCCATCTGTGTTTCTGTTCCCCC |
| | | CAAAGCCCAAGGACACCCTGATGATCAGCCGGACCCC |
| | | CGAAGTGACCTGCGTGGTGGTGGATGTGTCCCACGAGG |
| | | ACCCAGAAGTGAAGTTCAATTGGTACGTGGACGGCGTG |
| | | GAAGTGCACAACGCCAAGACCAAGCCGCGGGAAGAAC |
| | | AGTACAACAGCACCTACCGGGTGGTGTCCGTGCTGACA |
| | | GTGCTGCACCAGGACTGGCTGAACGGCAAAGAGTACA |
| | | AGTGCAAGGTGTCCAACAAGGCCCTGGGAGCCCCCATC |
| | | GAGAAAACCATCAGCAAGGCCAAGGGCCAGCCCCGCG |
| | | AACCTCAGGTGTACACCCTGCCCCCAAGCAGGGACGA |
| | | GCTGACCAAGAACCAGGTGTCCCTGACCTGTCTCGTGA |
| | | AGGGCTTCTACCCCTCCGATATCGCCGTGGAATGGGAG |
| | | AGCAACGGCCAGCCCGAGAACAACTACAAGACCACCC |
| | | CCCCTGTGCTGGACAGCGACGGCTCATTCTTCCTGTACT |
| | | CCAAGCTGACCGTGGACAAGAGCCGGTGGCAGCAGGG |
| | | CAACGTGTTCAGCTGCAGCGTGATGCACGAGGCCCTGC |
| | | ACAACCACTACACACAGAAGTCTCTGAGCCTGAGCCCT |
| | | GGCGGAGGGGGAGGATCTGGGGGAGGCGGAAGTGGG |
| | | GGAGGGGGTTCCGGAGGCGGAGGATCCGAAATCGTGT |
| | | TAACGCAGTCTCCAGGCACCCTGTCTTTGTCTCCAGGG |
| | | GAAAGAGCCACCCTCTCTTGCAGGGCCAGTCAGAGTGT |
| | | TAGCAGCAGCTACTTAGCCTGGTACCAGCAGAAACCTG |
| | | GCCAGGCTCCCAGGCTCCTCATCTATGGAGCATCCAGC |
| | | AGGGCCACTGGCATCCCAGACAGGTTCAGTGGCAGTG |
| | | GATCCGGGACAGACTTCACTCTCACCATCAGCAGACTG |
| | | GAGCCTGAAGATTTTGCAGTGTATTACTGTCAGCAGTA |
| | | TGGTAGCTCACCGCTGACGTTCGGCCAGGGGACCAAAG |
| | | TGGAAATCAAAAGCAGCGCTTCCACCAAGGGCCCCTCA |
| | | GTGTTCCCACTGGCACCATCCAGCAAGTCCACAAGCGG |
| | | AGGAACCGCCGCTCTGGGCTGTCTCGTGAAAGACTACT |
| | | TTCCAGAGCCAGTGACCGTGTCCTGGAATAGTGGCGCT |
| | | CTGACTTCTGGCGTGCACACTTTCCCCGCAGTGCTGCA |
| | | GAGTTCTGGCCTGTACTCCCTGAGTAGCGTCGTGACAG |
| | | TGCCCTCCTCTAGCCTGGGCACTCAGACTTACATCTGC |
| | | AATGTGAATCATAAGCCTTCCAACACAAAAGTGGACA |
| | | AAAAAGTGGAACCCAAATCTTGC |
| 230 | (DP47) VHCL- | GAGGTGCAATTGTTGGAGTCTGGGGGAGGCTTGGTACA |
| | light chain 2 | GCCTGGGGGGTCCCTGAGACTCTCCTGTGCAGCCTCCG |
| | (nucleotide | GATTCACCTTTAGCAGTTATGCCATGAGCTGGGTCCGC |
| | sequence) | CAGGCTCCAGGGAAGGGGCTGGAGTGGGTCTCAGCTA |
| | | TTAGTGGTAGTGGTGGTAGCACATACTACGCAGACTCC |
| | | GTGAAGGGCCGGTTCACCATCTCCAGAGACAATTCCAA |
| | | GAACACGCTGTATCTGCAGATGAACAGCCTGAGAGCC |
| | | GAGGACACGGCCGTATATTACTGTGCGAAAGGCAGCG |
| | | GATTTGACTACTGGGGCCAAGGAACCCTGGTCACCGTC |
| | | TCGAGTGCTAGCGTGGCCGCTCCCTCCGTGTTCATCTTC |
| | | CCACCTTCCGACGAGCAGCTGAAGTCCGGCACCGCTTC |
| | | TGTCGTGTGCCTGCTGAACAACTTCTACCCCCGCGAGG |
| | | CCAAGGTGCAGTGGAAGGTGGACAACGCCCTGCAGTC |
| | | CGGCAACAGCCAGGAATCCGTGACCGAGCAGGACTCC |
| | | AAGGACAGCACCTACTCCCTGTCCTCCACCCTGACCCT |
| | | GTCCAAGGCCGACTACGAGAAGCACAAGGTGTACGCC |
| | | TGCGAAGTGACCCACCAGGGCCTGTCTAGCCCCGTGAC |
| | | CAAGTCTTTCAACCGGGGCGAGTGC |
| 226 | (49B4) VLCL*- | see above |
| | light chain 1 | |
| | *E123R/Q124K | |
| 231 | heavy chain | QVQLVQSGAEVKKPGSSVKVSCKASGGTFSSYAISWVRQ |
| | (49B4) | APGQGLEWMGGIIPIFGTANYAQKFQGRVTITADKSTSTA |
| | VHCH1*_VHCH1* | YMELSSLRSEDTAVYYCAREYYRGPYDYWGQGTTVTVS |
| | Fc knob VLCH1 | SASTKGPSVFPLAPSSKSTSGGTAALGCLVEDYFPEPVTVS |
| | (DP47) | WNSGALTSGVHTFPAVLQSSGLYSLSSVVTVPSSSLGTQT |
| | *K147E/K213E | YICNVNHKPSNTKVDEKVEPKSCDGGGGSGGGGSQVQL |
| | | VQSGAEVKKPGSSVKVSCKASGGTFSSYAISWVRQAPGQ |
| | | GLEWMGGIIPIFGTANYAQKFQGRVTITADKSTSTAYMEL |
| | | SSLRSEDTAVYYCAREYYRGPYDYWGQGTTVTVSSASTK |
| | | GPSVFPLAPSSKSTSGGTAALGCLVEDYFPEPVTVSWNSG |
| | | ALTSGVHTFPAVLQSSGLYSLSSVVTVPSSSLGTQTYICNV |
| | | NHKPSNTKVDEKVEPKSCDKTHTCPPCPAPEAAGGPSVFL |
| | | FPPKPKDTLMISRTPEVTCVVVDVSHEDPEVKFNWYVDG |
| | | VEVHNAKTKPREEQYNSTYRVVSVLTVLHQDWLNGKEY |
| | | KCKVSNKALGAPIEKTISKAKGQPREPQVYTLPPSRDELT |
| | | KNQVSLTCLVKGFYPSDIAVEWESNGQPENNYKTTPPVL |
| | | DSDGSFFLYSKLTVDKSRWQQGNVFSCSVMHEALHNHY |
| | | TQKSLSLSPGGGGGSGGGGSGGGGSGGGGSEIVLTQSPGT |
| | | LSLSPGERATLSCRASQSVSSSYLAWYQQKPGQAPRLLIY |
| | | GASSRATGIPDRFSGSGSGTDFTLTISRLEPEDFAVYYCQQ |
| | | YGSSPLTFGQGTKVEIKSSASTKGPSVFPLAPSSKSTSGGT |
| | | AALGCLVKDYFPEPVTVSWNSGALTSGVHTFPAVLQSSG |
| | | LYSLSSVVTVPSSSLGTQTYICNVNHKPSNTKVDKKVEPK |
| | | SC |
| 232 | (DP47) VHCL- | EVQLLESGGGLVQPGGSLRLSCAASGFTFSSYAMSWVRQ |
| | light chain 2 | APGKGLEWVSAISGSGGSTYYADSVKGRFTISRDNSKNTL |
| | | YLQMNSLRAEDTAVYYCAKGSGFDYWGQGTLVTVSSAS |
| | | VAAPSVFIFPPSDEQLKSGTASVVCLLNNFYPREAKVQWK |
| | | VDNALQSGNSQESVTEQDSKDSTYSLSSTLTLSKADYEKH |
| | | KVYACEVTHQGLSSPVTKSFNRGEC |

[0776] All genes were transiently expressed under control of a chimeric MPSV promoter consisting of the MPSV core promoter combined with the CMV promoter enhancer fragment. The expression vector also contains the oriP region for episomal replication in EBNA (Epstein Barr Virus Nuclear Antigen) containing host cells.

[0777] The bispecific anti-Ox40/anti-FAP constructs were produced by co-transfecting HEK293-EBNA cells with the mammalian expression vectors using polyethylenimine (PEI; Polysciences Inc.). The cells were transfected with the corresponding expression vectors in a 1:2:1 ratio (“vector heavy chain”:“vector light chain 1”:“vector light chain 2”).

[0778] For a 200 mL production in 500 mL shake flasks, 250 million HEK293 EBNA cells were seeded 24 hours before transfection in Excell (Sigma) media with supplements. For transfection, the cells were centrifuged for 5 minutes at 210×g, and supernatant was replaced by pre-warmed CD-CHO medium (Gibco). Expression vectors were mixed in 20 mL CD-CHO medium (Gibco) to a final amount of 200 μg DNA. After addition of 540 μL PEI (1 mg/mL) (Polysciences Inc.), the solution was vortexed for 15 seconds and incubated for 10 minutes at room temperature. Afterwards, cells were mixed with the DNA/PEI solution, transferred to a 500 mL shake flask and incubated for 3 hours at 37° C. in an incubator with a 5% CO₂ atmosphere and shaking at 165 rpm. After the incubation, 160 mL Excell medium (Sigma) with supplements (1 mM valproic acid, 5 g/l PepSoy, 6 mM L-Glutamine) was added and cells were cultured for 24 hours. 24 h after transfection the cells were supplement with an amino acid and glucose feed at 12% final volume (24 mL) and 3 g/L glucose (1.2 mL from 500 g/L stock). After culturing for 7 days, the cell supernatant was collected by centrifugation for 45 minutes at 2000-3000×g. The solution was sterile filtered (0.22 μm filter), supplemented with sodium azide to a final concentration of 0.01% (w/v), and kept at 4° C.

[0779] For affinity chromatography, the supernatant was loaded on a ProtA MabSelect Sure column (CV=5 mL, GE Healthcare) equilibrated with 30 mL 20 mM sodium citrate, 20 mM sodium phosphate, pH 7.5. Unbound protein was removed by washing with 6-10 column volumes of a buffer containing 20 mM sodium phosphate, 20 mM sodium citrate, pH 7.5. The bound protein was eluted using a step elution with 8 CV of 20 mM Sodium Citrate, 100 mM Sodium Chloride, 100 mM Glycine, pH 3.0.

[0780] The pH of the collected fractions was adjusted by adding 1/10 (v/v) of 0.5 M sodium phosphate pH8.0. The protein was concentrated and filtered prior to loading on a HiLoad Superdex 200 column (GE Healthcare) equilibrated with 20 mM histidine, 140 mM NaCl, 0.01% Tween20, pH 6.0.

[0781] The protein concentration of purified bispecific tetravalent 4+2 constructs was determined by measuring the OD at 280 nm, using the molar extinction coefficient calculated on the basis of the amino acid sequence. Purity and molecular weight of the bispecific constructs were analyzed by CE-SDS in the presence and absence of a reducing agent (Invitrogen) using a LabChipGXII (Caliper). The aggregate content of bispecific constructs was analyzed using a TSKgel G3000 SW XL analytical size-exclusion column (Tosoh) equilibrated in a 25 mM potassium phosphate, 125 mM sodium chloride, 200 mM L-arginine monohydrocloride, 0.02% (w/v) NaN₃, pH 6.7 running buffer at 25° C. (Table 35).

TABLE 35
Biochemical analysis of exemplary bispecific, tetravalent anti-Ox40/anti-
FAP IgG1 P329G LALA antigen binding molecules (4 + 2 constructs)

| | Yield | Monomer | CE-SDS | |
|---|---|---|---|---|
| Construct | [mg/l] | [%] | (non red) | CE-SDS (red) |
| OX40(49B4)/ | 1.21 | 99.3 | 96.2% | 3.74% (145.6 kDa) |
| FAP(28H1) | | 0.7 HMW | | 33.06% (121.34 kDa) |
| P329GLALA | | | | 0.46% (31.6 kDa) |
| IgG1 4 + 2 | | | | 45.48% (29.2 kDa) |
| | | | | 16.93% (26.65 kDa) |
| OX40(49B4)/ | 1.32 | 99.2 | 90.4% | 4.24% (145.28 kDa) |
| DP47 | | 0.8 HMW | | 31.28% (121.3 kDa) |
| P329GLALA | | | | 0.5% (31.65 kDa) |
| IgG1 4 + 2 | | | | 0.38% (30.25 kDa) |
| | | | | 48.93% (29.22 kDa) |
| | | | | 14.67% (26.89 kDa) |

### 4.6 Determination of the Aggregation Temperature of the Bispecific Tetravalent 4+1 and 4+2 Anti-OX40 Antigen Binding Molecules

[0782] For direct comparison of all formats the thermal stability was monitored by Static Light Scattering (SLS) and by measuring the intrinsic protein fluorescence in response to applied temperature stress. 30 μg of filtered protein sample with a protein concentration of 1 mg/ml was applied in duplicate to an Optim 2 instrument (Avacta Analytical Ltd). The temperature was ramped from 25 to 85° C. at 0.1° C./min, with the radius and total scattering intensity being collected. For determination of intrinsic protein fluorescence the sample was excited at 266 nm and emission was collected between 275 nm and 460 nm.

[0783] For all constructs the aggregation temperature was between 49° C. and 67° C. depending on the binder combination and format.

### 4.7 Characterization of Bispecific, Tetravalent Constructs Targeting Ox40 and FAP

### 4.7.1 Binding to Human FAP-Expressing Tumor Cells

[0784] The binding to cell surface FAP was tested using WM266-4 cells (ATCC CRL-1676). 0.5×10⁵ WM266-4 cells were added to each well of a round-bottom suspension cell 96-well plates (greiner bio-one, cellstar, Cat. No. 650185). Cells were stained for 120 minutes at 4° C. in the dark in 50 μL/well 4° C. cold FACS buffer (DPBS (Gibco by Life Technologies, Cat. No. 14190 326) w/BSA (0.1% v/w, Sigma-Aldrich, Cat. No. A9418) containing titrated anti-OX40 antibody constructs. After three times washing with excess FACS buffer, cells were stained for 45 minutes at 4° C. in the dark in 25 μL/well 4° C. cold FACS buffer containing Fluorescein isothiocyanate (FITC)-conjugated AffiniPure anti-human IgG Fcγ-fragment-specific goat IgG F(ab′)₂ fragment (Jackson ImmunoResearch, Cat.-No. 109-096-098).

[0785] Plates were finally resuspended in 85 μL/well FACS-buffer containing 0.2 μg/mL DAPI (Santa Cruz Biotec, Cat. No. Sc-3598) and acquired the same day using 5-laser LSR-Fortessa (BD Bioscience with DIVA software).

[0786] As shown in FIGS. 17A and 17B, the FAP-targeted bispecific tetravalent OX40 constructs but not the untargeted OX40 constructs efficiently bound to human FAP-expressing target cells. Therefore only FAP-targeted anti-OX40 constructs show direct tumor-targeting properties. For the 4+1 format, FAP clone 4B9 had a much stronger binding to human FAP than FAP clone 28H1, where under used washing conditions hardly any binding was observed with flow cytometric analysis. For clone 28H1, the 2+2 and 4+2 constructs (filled circle and triangle) showed stronger binding to FAP than the 4+1 constructs (square) explained by a gain of avidity in the bivalent relative to the monovalent format. The difference in FAP binding between the tetravalent and the bivalent 49B4 construct (filled triangle versus circle), which contain the same bivalent FAP binding moiety, hints that there are already steric hindrances in FAP binding, maybe due to the bigger size of the tetravalent construct. EC₅₀ values of binding to activated human and cynomolgus CD4 T cells (measured as described in Examples 4.3.2.1 and 4.3.2.2) and FAP positive tumor cells are summarized in Table 36.

TABLE 36
EC₅₀ values for binding of selected aOX40 binder (clone 49B9) in
different constructs to cell surface human FAP and human Ox40

| | | human FAP+ | human OX40+ | cynomolgus |
|---|---|---|---|---|
| | | cell | cell | OX40+ cell |
| Construct | anti-FAP clone | EC₅₀ [nM] | EC₅₀ [nM] | EC₅₀ [nM] |
| hu IgG1 | n.t. | — | 907.17 | 0.05 |
| 2 + 2 | 28H1 | 1.31 | 5.34 | 0.13 |
| 4 + 1 | 28H1 | n.d. | 0.08 | 0.02 |
| 4 + 1 | 4B9 | 6.66 | 0.16 | 0.03 |
| 4 + 1 | n.t. | — | 0.13 | 0.01 |
| 4 + 2 | 28H1 | 5.51 | 0.13 | 0.01 |
| 4 + 2 | n.t. | — | 0.11 | 0.07 |

n.t. = non targeted,
n.d. = not detected

### 4.7.2 Surface Plasmon Resonance

[0787] The capacity of the bispecific constructs to bind human, murine and cynomolgus FAP was assessed by surface plasmon resonance (SPR). All SPR experiments were performed on a Biacore T200 (Biacore) at 25° C. with HBS-EP as running buffer (0.01 M HEPES pH 7.4, 0.15 M NaCl, 3 mM EDTA, 0.005% Surfactant P20, (Biacore).

[0788] His-tagged human, murine or cynomolgus monkey dimeric FAP was captured on a CM5 chip (GE Healthcare) immobilized with anti-His antibody (Qiagen Cat. No. 34660) by injection of 500 nM huFAP for 60 s at a flow rate of 10 uL/min, 10 nM murine FAP for 20 s at a flow rate of 20 uL/min and 10 nM cynoFAP for 20 s at a flow rate of 20 Ll/min Immobilization levels for the anti-His antibody of up to 18000 resonance units (RU) were used.

[0789] Following the capture step, the bispecific constructs as well as control molecules were immediately passed over the chip surface at a concentration ranging from 0.006-100 nM with a flow rate of 30 μL/minute for 280 s and a dissociation phase of 180 s. Bulk refractive index differences were corrected for by subtracting the response obtained in a reference flow cell, where no FAP was immobilized. Affinity was determined using the Langmuir 1:1 curve fitting. For bivalent binding the same 1:1 fitting was used leading to an apparent K_{D} value.

TABLE 37
Binding of exemplary bispecific anti-Ox40/anti-FAP antigen binding
molecules to recombinant human FAP, murine FAP and cynomolgus FAP

| | hu FAP | mu FAP | cyno FAP |
|---|---|---|---|
| Construct | K_{D} (M) | K_{D} (M) | K_{D} (M) |
| OX40(49B4)/FAP(28H1) | 2.44E−08 | 5.40E−11 | 4.19E−08 |
| P329GLALA IgG1 4 + 1 | | | |
| OX40(49B4)/FAP(4B9) | 1.69E−09 | 9.38E−08 | 1.54E−09 |
| P329GLALA IgG1 4 + 1 | | | |
| OX40(49B4)/FAP(28H1) | 6.38E−10 | 4.41E−12 | 6.10E−10 |
| P329GLALA IgG1 4 + 2 | | | |
| OX40(49B4)/FAP(28H1) | 3.60E−09 | 1.63E−12 | 4.37E−09 |
| P329GLALA IgG1 1 + 1 | | | |
| OX40(49B4)/FAP(4B9) | 7.52E−10 | 4.79E−09 | 5.32E−10 |
| P329GLALA IgG1 1 + 1 | | | |
| 28H1 IgG | 9.33E−10 | 4.90E−13 | 6.69E−10 |
| 49B4 IgG | 9.98E−11 | 6.44E−11 | 4.84E−11 |

### 4.7.3 Binding to OX40

### 4.7.3.1 Binding to Human Ox40 Expressing Cells: Naïve and Activated Human Peripheral Mononuclear Blood Leukocytes (PBMC)

[0790] Buffy coats were obtained from the Zurich blood donation center. To isolate fresh peripheral blood mononuclear cells (PBMCs) the buffy coat was diluted with the same volume of DPBS (Gibco by Life Technologies, Cat. No. 14190 326). 50 mL polypropylene centrifuge tubes (TPP, Cat.-No. 91050) were supplied with 15 mL Histopaque 1077 (SIGMA Life Science, Cat.-No. 10771, polysucrose and sodium diatrizoate, adjusted to a density of 1.077 g/mL) and the buffy coat solution was layered above the Histopaque 1077. The tubes were centrifuged for 30 min at 400×g, room temperature and with low acceleration and no break. Afterwards the PBMCs were collected from the interface, washed three times with DPBS and resuspended in T cell medium consisting of RPMI 1640 medium (Gibco by Life Technology, Cat. No. 42401-042) supplied with 10% Fetal Bovine Serum (FBS, Gibco by Life Technology, Cat. No. 16000-044, Lot 941273, gamma-irradiated, mycoplasma-free and heat inactivated at 56° C. for 35 min), 1% (v/v) GlutaMAX I (GIBCO by Life Technologies, Cat. No. 35050 038), 1 mM Sodium-Pyruvate (SIGMA, Cat. No. S8636), 1% (v/v) MEM non-essential amino acids (SIGMA, Cat.-No. M7145) and 50 μM •-Mercaptoethanol (SIGMA, M3148).

[0791] PBMCs were used directly after isolation (binding on resting human PBMCs) or they were stimulated to receive a strong human Ox40 expression on the cell surface of T cells (binding on activated human PBMCs). Therefore naïve PBMCs were cultured for four days in T cell medium supplied with 200 U/mL Proleukin (Novartis) and 2 ug/mL PHA-L (Sigma-Aldrich, L2769-10) in 6-well tissue culture plate and then 1 day on pre-coated 6-well tissue culture plates [4 ug/mL] anti-human CD3 (clone OKT3, eBioscience, Ca. No. 16-0037-85) and [2 ug/mL] anti-human CD28 (clone CD28.2, eBioscience, Cat No. 16-0289-85] in T cell medium supplied with 200 U/mL Proleukin at 37° C. and 5% CO₂.

[0792] For detection of OX40 naïve human PBMC and activated human PBMC were mixed. To enable distinction of naïve from activated human PBMC naïve cells were labeled prior to the binding assay using the eFluor670 cell proliferation dye (eBioscience, Cat.-No. 65-0840-85).

[0793] For labeling cells were harvested, washed with pre-warmed (37° C.) DPBS and adjusted to a cell density of 1×10⁷ cells/mL in DPBS. eFluor670 cell proliferation dye (eBioscience, Cat.-No. 65-0840-85) was added to the suspension of naïve human PBMC at a final concentration of 2.5 mM and a final cell density of 0.5×107 cells/mL in DPBS. Cells were then incubated for 10 min at room temperature in the dark. To stop labeling reaction 4 mL heat inactivated FBS were added and cells were washed three times with T cell medium. A two to one mixture of 1×105 resting eFluor670 labeled human PBMC and 0.5×105 unlabeled activated human PBMC were then added to each well of a round-bottom suspension cell 96-well plates (greiner bio-one, cellstar, Cat. No. 650185).

[0794] Cells were stained for 120 minutes at 4° C. in the dark in 50 μL/well 4° C. cold FACS buffer containing titrated anti-Ox40 antibody constructs. After three times washing with excess FACS buffer, cells were stained for 45 minutes at 4° C. in the dark in 25 μL/well 4° C. cold FACS buffer containing a mixture of fluorescently labeled anti-human CD4 (clone RPA-T4, mouse IgG1 k, BioLegend, Cat.-No. 300532), anti-human CD8 (clone RPa-T8, mouse IgG1k, BioLegend, Cat.-No. 3010441) and Fluorescein isothiocyanate (FITC)-conjugated AffiniPure anti-human IgG Fcγ-fragment-specific goat IgG F(ab′)2 fragment (Jackson ImmunoResearch, Cat. No. 109 096 098).

[0795] Plates were finally resuspended in 85 μL/well FACS-buffer containing 0.2 μg/mL DAPI (Santa Cruz Biotec, Cat. No. Sc-3598) and acquired the same day using 5-laser LSR-Fortessa (BD Bioscience with DIVA software).

[0796] As shown in FIGS. 18A, 18B, 18C, and 18D and FIGS. 19A, 19B, 19C, and 19D, no antibody construct specific for OX40 bound to resting human CD4+ T-cells or CD8+ T-cells, which are negative for OX40. In contrast, all constructs bound to activated CD8+ or CD4+ T-cells, which do express OX40. Binding to CD4+ T-cells was much stronger than that to CD8+ T cells. Activated human CD8+ T cells do express only a fraction of the OX40 levels detected on activated CD4+ T cells. Expression levels for OX40 are depending on kinetic and strength of stimulation and conditions were here optimized for OX40 expression on CD4+ T cells but not for CD8+ T cells. Thus, only little Ox40 expression was induced on CD8 T cells. The analyzed bispecific anti-OX40 constructs varied in their binding strength (EC50 values see Table 34). Tetravalent OX40 binding (circle and square) strongly increased avidity for OX40. In comparison, both bivalent constructs (triangle) showed a weaker binding to CD4+ T cells. The presence of a FAP binding moiety had no impact on OX40 binding for the tetravalent OX40 binders (e.g. by steric hindrance, compare open vs filled symbols). The binding of clone 49B9 in a bivalent, bispecific construct however was clearly stronger than that in the conventional IgG format.

### 4.7.3.2 Binding to Cynomolgus OX40 Expressing Cells: Activated Cynomolgus Peripheral Mononuclear Blood Leukocytes (PBMC)

[0797] To test the reactivity of anti-OX40 constructs with cynomolgus cells, PBMC of healthy Macaca fascicularis were isolated from heparinized blood using density gradient centrifugation as described for human cells in section 4.7.3.1 with minor modifications. Cynomolgus PBMC were isolated with density gradient centrifugation from heparinized fresh blood using Histopaque 1077 (SIGMA Life Science, Cat.-No. 10771, polysucrose and sodium diatrizoate, adjusted to a density of 1.077 g/mL) diluted with DPBS (90% v/v). Centrifugation was performed at 520×g, without brake at room temperature for 30 minutes. PBMCs were stimulated to receive a strong OX40 expression on the cell surface of T cells (binding on activated cynomolgus PBMCs). Therefore naïve PBMCs were cultured for 72 hrs on pre-coated 12-well tissue culture plates [10 ug/mL] cynomolgus cross-reactive anti-human CD3 (clone SP34-2, BDBioscience, Cat No. 551916) and [2 ug/mL] cynomolgus cross-reactive anti-human CD28 (clone CD28.2, eBioscience, Cat No. 16-0289-85] in T cell medium supplied with 200 U/mL Proleukin at 37° C. and 5% CO2.

[0798] 0.5×105 activated cynomolgus PBMC were then added to each well of a round-bottom suspension cell 96-well plates (greiner bio-one, cellstar, Cat. No. 650185). Cell were washed once with 200 μL 4° C. cold FACS buffer and were incubated in 50 μL/well of 4° C. cold FACS containing titrated anti-Ox40 antibody constructs for 120 minutes at 4° C. Then, plates were washed four times with 200 μL/well 4° C. FACS buffer. Cells were resuspended in 25 μL/well 4° C. cold FACS buffer containing fluorescently labeled, cynomolgus cross-reactive anti-human CD4 (clone OKT-4, mouse IgG1 k, BD, Cat.-No. 317428), anti-human CD8 (clone HIT8a, mouse IgG1k, BD, Cat.-No. 555369) and FITC-conjugated AffiniPure anti-human IgG Fcγ-fragment-specific goat IgG F(ab′)2 fragment (Jackson ImmunoResearch, Cat. No. 109 096 098) and incubated for 60 minutes at 4° C. in the dark. Plates where washed twice with 200 μL/well 4° C. FACS buffer, were finally resuspended in 80 μL/well FACS-buffer containing 0.2 μg/mL DAPI (Santa Cruz Biotec, Cat. No. Sc-3598) and acquired the same day using 5-laser LSR-Fortessa (BD Bioscience with DIVA software).

[0799] As shown in FIGS. 20A, 20B, 20C, and 20D, all 49B4 constructs bound to activated CD4+ cynomolgus T-cells. The analyzed anti-OX40 antibody constructs varied in their binding strength (EC50 values summarized in Table 34). Constructs with a tetravalent OX40 binding moiety showed a stronger binding to Ox40+ T cells than bivalent constructs. The gain in avidity between tetravalent and bivalent binding to OX40 was less strong than what was observed for human OX40 (˜5× gain versus ˜50× gain, compare values in Table 34). Binding to CD4+ T-cells was much stronger than that to CD8+ T cells. Expression levels for OX40 are depending on kinetic and strength of stimulation and were optimized for CD4+ cynomolgus T cells but not for CD8+ cynomolgus T cells, so that only little OX40 expression was induced on CD8+ T cells.

4.7.3.3 Binding to humanOX40-Competition Binding of Bivalent Vs Tetravalent Ox40 Binding

[0800] To confirm the ability of all four anti-OX40 Fab domains to bind to huOX40, a cell-based FRET assay (TagLite) was applied. Therefore, 900 Hek293 EBNA cells/well transfected with huOX40-SNAP fusion and labeled with the FRET donor Terbium (Cisbio) were mixed with 1.56 nM (49B4) IgG labeled with the FRET acceptor d2 (Cisbio). Additionally, a concentration dilution ranging from 0.01-750 nM from either (49B4) IgG or bispecific construct 49B4/28H1 (4+1) was added and incubated for 2-4 hours at RT. The fluorescent signal was measured at 620 nm for the fluorescent donor (Terbium) and at 665 nm for the fluorescent acceptor dye (M100 Pro, Tecan). The ratio of 665/620*1000 was calculated, and the reference (cells only) was subtracted (FIG. 21A). For EC₅₀ determination the results were analysed in Graph Pad Prism5. The observed EC₅₀ values are shown in Table 38.

TABLE 38
EC₅₀ values for competition binding of bivalent vs
tetravalent OX40 antigen binding molecules

| Construct | EC₅₀ (nM) |
|---|---|
| 49B4 IgG1 | 12.7 (5.8-25) |
| OX40(49B4)/FAP(28H1) | 0.45 (0.35-0.58) |
| P329GLALA IgG1 4 + 1 | |

### 4.7.4 Simultaneous Binding to OX40 and FAP

[0801] The capacity of binding simultaneously human OX40 Fc (kih) and human FAP was assessed by surface plasmon resonance (SPR). All SPR experiments were performed on a Biacore T200 (Biacore) at 25° C. with HBS-EP as running buffer (0.01 M HEPES pH 7.4, 0.15 M NaCl, 3 mM EDTA, 0.005% Surfactant P20 (Biacore).

[0802] Biotinylated human OX40 Fc (kih) was directly coupled to a flow cell of a streptavidin (SA) sensor chip. Immobilization levels up to 1000 resonance units (RU) were used.

[0803] The bispecific antibodies targeting OX40 and FAP were passed over the chip surface at a concentration of 250 nM with a flow rate of 30 μL/minute for 90 seconds and dissociation was set to zero sec. Human FAP was injected as second analyte with a flow rate of 30 μL/minute for 90 seconds at a concentration of 250 nM (see FIG. 21B). The dissociation was monitored for 120 sec. Bulk refractive index differences were corrected for by subtracting the response obtained in a reference flow cell, where no protein was immobilized.

[0804] All bispecific constructs could bind simultaneously to human OX40 and human FAP apart from the DP47 control molecules (FIGS. 22A, 22B, 22C, 22D, and 22E).

### 4.73 Binding to OX40 and FAP Negative Tumor Cells

[0805] The lack of binding to OX40 negative FAP negative tumor cells was tested using A549 NucLight™ Red Cells (Essenbioscience, Cat. No. 4491) expressing the NucLight Red fluorescent protein restricted to the nucleus to allow separation from unlabeled human FAP positive WM266-4 cells. Parental A549 (ATCC CCL-185) were transduced with the Essen CellPlayer NucLight Red Lentivirus (Essenbioscience, Cat. No. 4476; EF1α, puromycin) at an MOI of 3 (TU/cell) in the presence of 8 μg/ml polybrene following the standard Essen protocol. This resulted in ≧70% transduction efficiency.

[0806] A mixture of 5×104 unlabeled WM266-4 cells and unlabeled A549 NucLight™ Red Cells in FACS buffer were added to each well of a round-bottom suspension cell 96-well plates and the binding assay was performed as described in section 4.7.1.

[0807] As shown in FIGS. 23A, 23B, 23C, and 23D, no 49B4 antibody construct bound to Ox40 negative FAP negative human tumor cells.

### Example 5

### Functional Properties of Bispecific Anti-Human OX40 Binding Molecules

### 5.1 HeLa Cells Expressing Human OX40 and Reporter Gene NFκB-Luciferase

[0808] Agonstic binding of Ox40 to its ligand induces downstream signaling via activation of nuclear factor kappa B (NFκB) (A. D. Weinberg et al., J. Leukoc. Biol. 2004, 75(6), 962-972). The recombinant reporter cell line HeLa_hOx40_NFkB_Luc1 was generated to express human OX40 on its surface. Additionally, it harbors a reporter plasmid containing the luciferase gene under the control of an NFκB-sensitive enhancer segment. OX40 triggering induces dose-dependent activation of NFκB, which translocates in the nucleus, where it binds on the NFκB sensitive enhancer of the reporter plasmid to increase expression of the luciferase protein. Luciferase catalyzes luciferin-oxidation resulting in oxyluciferin which emits light. This can be quantified by a luminometer. Thus, the capacity of the various anti-OX40 antigen binding molecules to induce NFκB activation in HeLa_hOx40_NFkB_Luc1 reporter cells was analyzed as a measure for bioactivity.

[0809] Adherent HeLa_hOx40_NFkB_Luc1 cells were harvested using cell dissociation buffer (Invitrogen, Cat.-No. 13151-014) for 10 minutes at 37° C. Cells were washed once with DPBS and were adjusted to a cell density of 0.64*10⁵ in assay media comprising of MEM (Invitrogen, Cat.-No. 22561-021), 10% (v/v) heat-inactivated FBS, 1 mM Sodium-Pyruvate and 1% (v/v) non-essential amino acids. Cells were seeded in a density of 0.1*10⁵cells per well in a sterile white 96-well flat bottom tissue culture plate with lid (greiner bio-one, Cat. No. 655083) and kept over night at 37° C. and 5% CO₂ in an incubator (Hera Cell 150).

[0810] The next day, HeLa_hOx40_NFkB_Luc1 were stimulated for 6 hours by adding assay medium containing various titrated bispecific anti-OX40 (clone 49B4) antibody constructs in a P329GLALA huIgG1 format. For testing the effect of hyper-crosslinking on anti-Ox40 antibodies, 25 μL/well of medium containing secondary antibody anti-human IgG Fcγ-fragment-specific goat IgG F(ab′)₂ fragment (Jackson ImmunoResearch, 109-006-098) were added in a 1:2 ratio (2 times more secondary antibody than the primary anti-Ox40 P329GLALA huIgG1). After incubation, supernatant was aspirated and plates washed two times with DPBS. Quantification of light emission was done using the luciferase 100 assay system and the reporter lysis buffer (both Promega, Cat.-No. E4550 and Cat-No: E3971) according to manufacturer instructions. Briefly, cells were lysed for 10 minutes at −20° C. by addition of 30 uL per well 1× lysis buffer. Cells were thawed for 20 minutes at 37° C. before 90 uL per well provided luciferase assay reagent was added. Light emission was quantified immediately with a SpectraMax M5/M5e microplate reader (Molecular Devices, USA) using 500 ms integration time, without any filter to collect all wavelengths. Emitted relative light units (URL) were corrected by basal luminescence of HeLa_hOx40_NFkB_Luc1 cells and were blotted against the logarithmic primary antibody concentration using Prism4 (GraphPad Software, USA). Curves were fitted using the inbuilt sigmoidal dose response.

[0811] As shown in FIGS. 24A, 24B, 24C, and 24D, a limited, dose dependent NFκB activation was induced already by addition of anti-OX40 P329GLALA huIgG1 antibodies (left side) to the reporter cell line. Constructs with a tetravalent OX40 binding moiety induced a stronger NFkB activation than constructs with a bivalent OX40 binding moiety. This is in line with the finding that the minimal signaling unit of the OX40 receptor is a trimer (M. Croft, Nat rev Immunol. 2009, 9, 271-285). Hyper-crosslinking of anti-OX40 antibodies by anti-human IgG specific secondary antibodies strongly increased the induction of NFκB-mediated luciferase-activation in a concentration-dependent manner (right side). The gain was within the tetravalent and bivalent group of constructs.

[0812] Consequently, the NFkB activating capacity of aOx40 binder 49B9 in different bispecific human IgG1 P329GLALA formats with hyper-crosslinking of the constructs by FAP+ tumor cell lines was tested.

[0813] Tested tumor cell lines were WM266-4 cells (ATCC CRL-1676), NIH/3T3-moFAP clone 26 and NIH/3T3-huFAP clone 39. NIH/3T3-huFAP clone 39 and NIH/3T3-moFAP clone 26 was generated by the transfection of the mouse embryonic fibroblast NIH/3T3 cell line (ATCC CRL-1658) with the expression vector pETR4921 to express huFAP and expression vector pETR4906 to express moFAP, all under 1.5 μg/mL Puromycin selection. The surface expression of FAP was quantified using the Quifikit (Dako Cat. No. K0078) according to manufacturer's instructions. The primary antibody used to detect cell surface FAP expression was the human/mouse crossreactive clone F11-24 (mouse IgG1, Calbiochem, Ca. No. OP188). The surface expression on WM266-4 cells was in average app 40000 huFAP per cell (low expression, FAP+/−), for NIH/3T3-huFAP clone 39 app. 90000 huFAP per cell (intermediate expression, FAP+) and for NIH/3T3-moFAP clone 26 app. 160000 moFAP per cell (high expression, FAP++).

[0814] As described herein before, adherent HeLa_hOx40_NFkB_Luc1 cells were cultured over night at a cell density of 0.1*105 cells per well and were stimulated for 5 to 6 hours with assay medium containing titrated anti-OX40 constructs. To test the effect of hyper-crosslinking by cell surface FAP binding 25 μL/well of medium containing FAP+tumor cells (WM266-4, NIH/3T3-huFAP clone 39, NIH/3T3-moFAP cl 26) were co-cultured in a 4 to 1 ratio (four times as much FAP+tumor cells than reporter cells per well). Activated NFκB was quantified by measuring light emission using luciferase 100 assay system and the reporter lysis buffer (both Promega, Cat. No. E4550 and Cat-No: E3971) as described herein before.

[0815] As shown in FIGS. 25A, 25B, 25C, 25D, 25E, and 25F and FIGS. 26A, 26B and 26C, the presence of all anti-OX40 constructs induced a limited NFκB activation. FAP-expressing tumor cells strongly increased induction of NFκB-mediated luciferase-activation when FAP targeted molecules (filled circle, square and triangle) were used but not when non-targeted bispecific constructs (compare respective open circle, square and triangle) were added.

[0816] For a better comparison of all formats the area under the curve of the respective blotted dose-response curves was quantified as a marker for the agonistic capacity of each construct. As shown in FIGS. 26A, 26B and 26C, the tetravalent, FAP-targeted constructs were superior to the bivalent FAP-targeted molecules. A high expression of FAP ensured higher cross-linking and thus a better agonistic effect of the FAP-targeted constructs (compare low FAP expressing WM266-4 cells, with intermediate FAP expressing NIH-3T3 human FAP cells with high FAP expressing NIH-3T3 mouse FAP cells).

### 5.2 OX40 Mediated Costimulation of Suboptimally TCR Triggered Pre-Activated Human CD4 T Cells

[0817] Ligation of OX40 provides a synergistic co-stimulatory signal promoting division and survival of T-cells following suboptimal T-cell receptor (TCR) stimulation (M. Croft et al., Immunol. Rev. 2009, 229(1), 173-191). Additionally, production of several cytokines and surface expression of T-cell activation markers is increased (I. Gramaglia et al., J. Immunol. 1998, 161(12), 6510-6517; S. M. Jensen et al., Seminars in Oncology 2010, 37(5), 524-532).

[0818] To test agonistic properties of clone 49B9 in different bispecific human IgG1 P329GLALA formats, pre-activated OX40 positive CD4 T-cells were stimulated for 72 hours with a suboptimal concentration of plate-immobilized anti-CD3 antibodies in the presence of anti-Ox40 antibodies, either in solution or immobilized on the plate surface. Effects on T-cell survival and proliferation were analyzed through monitoring of total cell counts and CFSE dilution in living cells by flow cytometry. Additionally, cells were co-stained with fluorescently-labeled antibodies against T-cell activation and differentiation markers, e.g. CD127, CD45RA, Tim-3, CD62L and OX40 itself.

[0819] Human PBMCs were isolated via ficoll density centrifugation and were simulated for three days with PHA-L [2 μg/mL] and Proleukin [200 U/mL] as described under Example 4.7.3.1. Cells were then labeled with CFSE at a cell density of 1×10⁶ cells/mL with CFDA-SE (Sigma-Aldrich, Cat.-No. 2188) at a final concentration of [50 nM] for 10 minutes at 37° C. Thereafter, cells were washed twice with excess DPBS containing FBS (10% v/v). Labeled cells were rested in T-cell media at 37° C. for 30 minutes. Thereafter, non-converted CFDA-SE was removed by two additional washing steps with DPBS. CD4 T-cell isolation from pre-activated CFSE-labeled human PBMC was performed using the MACS negative CD4 T-cell isolation kit (Miltenyi Biotec, Cat. No. 130-096.533) according to manufacturer's instructions.

[0820] Morris et al. showed that agonistic co-stimulation with conventional anti-Ox40 antibodies relied on surface immobilization (N. P. Morris et al., Mol. Immunol. 2007, 44(12), 3112-3121). Thus, goat anti-mouse Fcγ-specific antibodies (Jackson ImmunoResearch, Ca. No. 111-500-5008) were coated to the surface of a 96 well U-bottom cell culture plate (Greiner Bio One) at a concentration of [2 μg/mL] in PBS over night at 4° C. in the presence (surface immobilized anti-OX40) or absence (anti-OX40 in solution) of goat anti-human Fcγ-specific antibody (Jackson ImmunoResearch, Ca. No. 109-006-098). Thereafter, the plate surface was blocked with DPBS containing BSA (1% v/w). All following incubation steps were done at 37° C. for 90 minutes in PBS containing BSA (1% v/w). Between the incubation steps, plates were washed with DPBS.

[0821] Mouse anti-human CD3 antibody (clone OKT3, eBioscience, Ca. No. 16-0037-85, fixed concentration [3 ng/mL]) was captured in a subsequent incubation step via the surface coated anti-mouse Fcγ-specific antibodies. In one experiment titrated human anti-OX40 antigen binding molecules were then immobilized on plate by an additional incubation step in DPBS. In a second experiment anti-OX40 antigen binding molecules were added during the activation assay directly to the media to plates not pre-coated with anti-human IgG Fc spec. antibodies.

[0822] CFSE-labeled preactivated CD4⁺ T cells were added to the pre-coated plates at a cell density of 0.5*10⁵ cells per well in 200 μL T-cell media and cultured for 96 hours. Cells were stained with a combination of fluorochrome-labeled mouse anti-human Ox40 (clone BerACT35, BioLegend, Ca. No. 35008), TIM-3 (clone F38-2E2, BioLegend, Ca. No. 345008), CD127 (clone A019D5, BioLegend, Ca. No. 351234), CD25 (clone M-AQ251, BioLegend, Cat. No. 356112) and CD45RA (clone HI100, BD Biosciences, Ca. No. 555489) for 20 minutes at 4° C. in the dark. Plates where washed twice with 200 μL/well 4° C. FACS buffer, were finally resuspended in 85 μL/well FACS-buffer containing 0.2 μg/mL DAPI (Santa Cruz Biotec, Cat. No. Sc-3598) and acquired the same day using 5-laser LSR-Fortessa (BD Bioscience with DIVA software).

[0823] DAPI-negative living cells were analyzed for decrease in median CFSE fluorescence as a marker for proliferation. The percentage of OX40 positive, CD25 high and TIM-3 positive T cells was monitored as a marker for T-cell activation. The expression of CD45RA and CD127 was analyzed to determine changes in maturation status of T cell, whereby CD45RA low CD127 low cells were categorized as effector T cells.

[0824] Co-stimulation with plate-immobilized antibodies strongly enhanced suboptimal stimulation of pre-activated human CD4 T cells with plate-immobilized anti-human CD3 in a dose dependent manner (FIGS. 27A, 27B, 27C, 27D, 27E, 27F, 27G, and 27H). T-cells proliferated stronger, showed a more mature phenotype with a higher percentage of effector T cells and had higher percentages of Ox40 positive activated cells. Molecules with tetravalent OX40 binding moieties were stronger agonistic than molecules with only bivalent binding to OX40. All five tetravalent molecules and the two bivalent molecules were able to enhance TCR stimulation to a similar extent. Thus, differences in the activating potential in the presence of FAP+ tumor cells within these two groups were mediated by different FAP binding capacity and crosslinking and not because of different ability to address OX40. No enhancement in suboptimal TCR stimulation was seen when anti-OX40 antigen binding molecules were added in solution in the absence of surface immobilization (FIGS. 28A, 28B, 28C, and 28D). This demonstrated again the strong dependency of OX40 axis activation on hypercrosslinking of the OX40 receptor.

### 5.3 Ox40 Mediated Costimulation of Suboptimally TCR Triggered Resting Human PBMC and Hypercrosslinking by Cell Surface FAP

[0825] It was shown in Example 5.1 that addition of FAP+tumor cells can strongly increase the NFkB activity induced by FAP targeted tetravalent anti-OX40 construct in human OX40 positive reporter cell lines by providing strong oligomerization of OX40 receptors. Likewise, we tested FAP targeted tetravalent anti-OX40 constructs in the presence of NIH/3T3-huFAP clone 39 cells for their ability to rescue suboptimal TCR stimulation of resting human PBMC cells.

[0826] Human PBMC preparations contain (1) resting OX40 negative CD4+ and CD8+ T cells and (2) antigen presenting cells with various Fc-γ receptor molecules on their cell surface e.g. B cells and monocytes. Anti-human CD3 antibody of human IgG1 isotype can bind with its Fc part to the present Fc-γ receptor molecules and mediate a prolonged TCR activation on resting Ox40 negative CD4+ and CD8+ T cells. These cells then start to express OX40 within several hours. Functional agonistic compounds against OX40 can signal via the OX40 receptor present on activated CD8+ and CD4+ T cells and support TCR-mediated stimulation.

[0827] Resting CFSE-labeled human PBMC were stimulated for five days with a suboptimal concentration of anti-CD3 antibody in the presence of irradiated FAP+NIH/3T3-huFAP clone 39 cells and titrated anti-OX40 constructs. Effects on T-cell survival and proliferation were analyzed through monitoring of total cell counts and CFSE dilution in living cells by flow cytometry. Additionally, cells were co-stained with fluorescently-labeled antibodies against T-cell activation marker CD25.

[0828] Mouse embryonic fibroblast NIH/3T3-huFAP clone 39 cells (see Example 4.3.2.2) were harvested using cell dissociation buffer (Invitrogen, Cat.-No. 13151-014) for 10 minutes at 37° C. Cells were washed once with DPBS. NIH/3T3-huFAP clone 39 cells were cultured at a density of 0.2*10⁵cells per well in T cell media in a sterile 96-well round bottom adhesion tissue culture plate (TPP, Cat. No. 92097) over night at 37° C. and 5% CO₂ in an incubator (Hera Cell 150). The next day they were irradiated in an xRay irradiator using a dose of 4500 RAD to prevent later overgrowth of human PBMC by the tumor cell line.

Human PBMCs were isolated by ficoll density centrifugation and were labeled with CFSE as described in Example 4.3.2.1. Cells were added to each well at a density of 0.5*10⁵ cells per well. Anti-human CD3 antibody (clone V9, human IgG1, described in Rodrigues et al., Int J Cancer Suppl 7, 45-50 (1992) and U.S. Pat. No. 6,054,297) at a final concentration of [10 nM] and anti-Ox40 constructs were added at the indicated concentrations. Cells were activated for five days at 37° C. and 5% CO₂ in an incubator (Hera Cell 150). Then, Cells were surface-stained with fluorescent dye-conjugated antibodies anti-human CD4 (clone RPA-T4, BioLegend, Cat.-No. 300532), CD8 (clone RPa-T8, BioLegend, Cat.-No. 3010441) and CD25 (clone M-A251, BioLegend, Cat.-No. 356112) for 20 min at 4° C. For permeabilizing the cell membrane, cell pellets were washed twice with FACS buffer, then resuspended in 50 μL/well freshly prepared FoxP3 Fix/Perm buffer (eBioscience Cat.-No. 00-5123 and 00-5223) for 45 min at room temperature in the dark. After three times washing with Perm-Wash buffer (eBioscience, Cat.-No. 00-8333-56), cells were stained intracellular with 25 μL/well Perm-Wash Buffer containing anti-human GranzymeB antibody (clone GB-11, BD Bioscience, Cat. No. 561142) for 1 h at room temperature in the dark. Cells were resuspended in 85 μL/well FACS buffer and acquired using a 5-laser Fortessa flow cytometer (BD Bioscience with DIVA software).

[0829] As shown in FIGS. 29A, 29B, 29C, and 29D; FIGS. 30A, 30B, 30C, and 30D; and FIGS. 31A, 31B, 31C, and 31D, costimulation with non-targeted tetravalent anti-OX40 (49B4) 4+1 construct (open square) and OX40 (49B4) 4+2 (open circle) only slightly rescued suboptimally TCR stimulated CD4 and CD8 T cells. Hyper-crosslinking of the FAP targeted 4+1 (filled and semi-filled square) and 4+2 (filled circle) anti-OX40 constructs by the present NIH/3T3-huFAP clone 39 cells strongly promoted proliferation (FIGS. 29A, 29B, 29C, and 29D), survival (FIGS. 30A, 30B, 30C, and 30D) and induced an enhanced activated phenotype (FIGS. 31A, 31B, 31C, and 31D) in human CD4 and CD8 T cells. The FAP-targeted tetravalent OX40 binders were clearly superior to the FAP-targeted bivalent OX40 binder (FIGS. 29 to 30: filled triangle, for comparison see FIGS. 32A, 32B, and 32C and FIG. 33). Cell surface immobilization of a bivalent OX40 agonist however, was more effective in supporting activation than addition of non-targeted tetravalent OX40 agonist (compare 2+2 (28H1) vs 4+1 (DP47)/4+2 (DP47) in FIGS. 32A, 32B, and 32C and FIG. 33). This finding in a primary cell setting was slightly different to the observations made in the NFκB reporter assay (FIGS. 26A, 26B and 26C). Here, tetravalency for OX40 resulted in stronger NFκB activation compared to bivalency, even when not surface-immobilized. So, for obtaining optimal OX40 agonism for T cells, not only sufficient oligomerization of the OX40 receptor needs to be obtained, but additionally, cell surface immobilization of OX40 receptor oligomers. Bivalent binding to FAP reduced the agonistic capacity of tetravalent OX40 molecules compared to monovalent binding to FAP (compare 4+1 (28H1) vs 4+2 (28H1) in FIGS. 31A, 31B, 31C, and 31D). This might be due to a reduced number of FAP targeted OX40 molecules, which can be bound per FAP positive cells. Higher affinity to FAP for a monovalent FAP binder additionally increased the agonistic capacity of the tetravalent OX40 agonist (compare 4+1 (28H1) vs 4+1 (4B9) in FIGS. 31A, 31B, 31C, and 31D), most likely by optimized hypercrosslinking of OX40 receptor oligomers.

### Example 6

### Generation of 4-1BB Antibodies and Tool Binders

### 6.1 Preparation, Purification and Characterization of Antigens and Screening Tools for the Generation of Novel 4-1BB Binders by Phage Display

[0830] DNA sequences encoding the ectodomains of human, mouse or cynomolgus 4-1BB (Table 39) were subcloned in frame with the human IgG1 heavy chain CH2 and CH3 domains on the knob (Merchant et al., 1998). An AcTEV protease cleavage site was introduced between an antigen ectodomain and the Fc of human IgG1. An Avi tag for directed biotinylation was introduced at the C-terminus of the antigen-Fc knob. Combination of the antigen-Fc knob chain containing the S354C/T366W mutations, with a Fc hole chain containing the Y349C/T366S/L368A/Y407V mutations allows generation of a heterodimer which includes a single copy of 4-1BB ectodomain containing chain, thus creating a monomeric form of Fc-linked antigen (FIG. 1A). Table 40 shows the cDNA and amino acid sequences of the antigen Fc-fusion constructs.

TABLE 39
Amino acid numbering of antigen ectodomains (ECD) and their origin

| SEQ | | | |
|---|---|---|---|
| ID NO: | Construct | Origin | ECD |
| 239 | human 4-1BB ECD | Synthetized according to | aa 24-186 |
| | | Q07011 | |
| 240 | cynomolgus 4-1BB | isolated from cynomolgus | aa 24-186 |
| | ECD | blood | |
| 241 | murine 4-1BB ECD | Synthetized according to | aa 24-187 |
| | | P20334 | |

TABLE 40
cDNA and amino acid sequences of monomeric antigen Fc(kih)
fusion molecules (produced by combination of one Fc hole chain
with one antigen Fc knob chain)

| SEQ ID NO: | Antigen | Sequence |
|---|---|---|
| 95 | Nucleotide | see Table 2 |
| | sequence | |
| | Fc hole chain | |
| 242 | Nucleotide | CTGCAGGACCCCTGCAGCAACTGCCCTGCCGGCACCTT |
| | sequence of | CTGCGACAACAACCGGAACCAGATCTGCAGCCCCTGCC |
| | human 4-1BB | CCCCCAACAGCTTCAGCTCTGCCGGCGGACAGCGGACC |
| | antigen Fc knob | TGCGACATCTGCAGACAGTGCAAGGGCGTGTTCAGAAC |
| | chain | CCGGAAAGAGTGCAGCAGCACCAGCAACGCCGAGTGC |
| | | GACTGCACCCCCGGCTTCCATTGTCTGGGAGCCGGCTG |
| | | CAGCATGTGCGAGCAGGACTGCAAGCAGGGCCAGGAA |
| | | CTGACCAAGAAGGGCTGCAAGGACTGCTGCTTCGGCAC |
| | | CTTCAACGACCAGAAGCGGGGCATCTGCCGGCCCTGGA |
| | | CCAACTGTAGCCTGGACGGCAAGAGCGTGCTGGTCAAC |
| | | GGCACCAAAGAACGGGACGTCGTGTGCGGCCCCAGCC |
| | | CTGCTGATCTGTCTCCTGGGGCCAGCAGCGTGACCCCT |
| | | CCTGCCCCTGCCAGAGAGCCTGGCCACTCTCCTCAGGT |
| | | CGACGAACAGTTATATTTTCAGGGCGGCTCACCCAAAT |
| | | CTGCAGACAAAACTCACACATGCCCACCGTGCCCAGCA |
| | | CCTGAACTCCTGGGGGGACCGTCAGTCTTCCTCTTCCCC |
| | | CCAAAACCCAAGGACACCCTCATGATCTCCCGGACCCC |
| | | TGAGGTCACATGCGTGGTGGTGGACGTGAGCCACGAA |
| | | GACCCTGAGGTCAAGTTCAACTGGTACGTGGACGGCGT |
| | | GGAGGTGCATAATGCCAAGACAAAGCCGCGGGAGGAG |
| | | CAGTACAACAGCACGTACCGTGTGGTCAGCGTCCTCAC |
| | | CGTCCTGCACCAGGACTGGCTGAATGGCAAGGAGTAC |
| | | AAGTGCAAGGTCTCCAACAAAGCCCTCCCAGCCCCCAT |
| | | CGAGAAAACCATCTCCAAAGCCAAAGGGCAGCCCCGA |
| | | GAACCACAGGTGTACACCCTGCCCCCATGCCGGGATGA |
| | | GCTGACCAAGAACCAGGTCAGCCTGTGGTGCCTGGTCA |
| | | AAGGCTTCTATCCCAGCGACATCGCCGTGGAGTGGGAG |
| | | AGCAATGGGCAGCCGGAGAACAACTACAAGACCACGC |
| | | CTCCCGTGCTGGACTCCGACGGCTCCTTCTTCCTCTACA |
| | | GCAAGCTCACCGTGGACAAGAGCAGGTGGCAGCAGGG |
| | | GAACGTCTTCTCATGCTCCGTGATGCATGAGGCTCTGC |
| | | ACAACCACTACACGCAGAAGAGCCTCTCCCTGTCTCCG |
| | | GGTAAATCCGGAGGCCTGAACGACATCTTCGAGGCCCA |
| | | GAAGATTGAATGGCACGAG |
| 243 | Nucleotide | TTGCAGGATCTGTGTAGTAACTGCCCAGCTGGTACATT |
| | sequence of | CTGTGATAATAACAGGAGTCAGATTTGCAGTCCCTGTC |
| | cynomolgus 4- | CTCCAAATAGTTTCTCCAGCGCAGGTGGACAAAGGACC |
| | 1BB antigen Fc | TGTGACATATGCAGGCAGTGTAAAGGTGTTTTCAAGAC |
| | knob chain | CAGGAAGGAGTGTTCCTCCACCAGCAATGCAGAGTGTG |
| | | ACTGCATTTCAGGGTATCACTGCCTGGGGGCAGAGTGC |
| | | AGCATGTGTGAACAGGATTGTAAACAAGGTCAAGAAT |
| | | TGACAAAAAAAGGTTGTAAAGACTGTTGCTTTGGGACA |
| | | TTTAATGACCAGAAACGTGGCATCTGTCGCCCCTGGAC |
| | | AAACTGTTCTTTGGATGGAAAGTCTGTGCTTGTGAATG |
| | | GGACGAAGGAGAGGGACGTGGTCTGCGGACCATCTCC |
| | | AGCCGACCTCTCTCCAGGAGCATCCTCTGCGACCCCGC |
| | | CTGCCCCTGCGAGAGAGCCAGGACACTCTCCGCAGGTC |
| | | GACGAACAGTTATATTTTCAGGGCGGCTCACCCAAATC |
| | | TGCAGACAAAACTCACACATGCCCACCGTGCCCAGCAC |
| | | CTGAACTCCTGGGGGGACCGTCAGTCTTCCTCTTCCCCC |
| | | CAAAACCCAAGGACACCCTCATGATCTCCCGGACCCCT |
| | | GAGGTCACATGCGTGGTGGTGGACGTGAGCCACGAAG |
| | | ACCCTGAGGTCAAGTTCAACTGGTACGTGGACGGCGTG |
| | | GAGGTGCATAATGCCAAGACAAAGCCGCGGGAGGAGC |
| | | AGTACAACAGCACGTACCGTGTGGTCAGCGTCCTCACC |
| | | GTCCTGCACCAGGACTGGCTGAATGGCAAGGAGTACA |
| | | AGTGCAAGGTCTCCAACAAAGCCCTCCCAGCCCCCATC |
| | | GAGAAAACCATCTCCAAAGCCAAAGGGCAGCCCCGAG |
| | | AACCACAGGTGTACACCCTGCCCCCATGCCGGGATGAG |
| | | CTGACCAAGAACCAGGTCAGCCTGTGGTGCCTGGTCAA |
| | | AGGCTTCTATCCCAGCGACATCGCCGTGGAGTGGGAGA |
| | | GCAATGGGCAGCCGGAGAACAACTACAAGACCACGCC |
| | | TCCCGTGCTGGACTCCGACGGCTCCTTCTTCCTCTACAG |
| | | CAAGCTCACCGTGGACAAGAGCAGGTGGCAGCAGGGG |
| | | AACGTCTTCTCATGCTCCGTGATGCATGAGGCTCTGCA |
| | | CAACCACTACACGCAGAAGAGCCTCTCCCTGTCTCCGG |
| | | GTAAATCCGGAGGCCTGAACGACATCTTCGAGGCCCAG |
| | | AAGATTGAATGGCACGAG |
| 244 | Nucleotide | GTGCAGAACAGCTGCGACAACTGCCAGCCCGGCACCTT |
| | sequence of | CTGCCGGAAGTACAACCCCGTGTGCAAGAGCTGCCCCC |
| | murine 4-1BB | CCAGCACCTTCAGCAGCATCGGCGGCCAGCCCAACTGC |
| | antigen Fc knob | AACATCTGCAGAGTGTGCGCCGGCTACTTCCGGTTCAA |
| | chain | GAAGTTCTGCAGCAGCACCCACAACGCCGAGTGCGAG |
| | | TGCATCGAGGGCTTCCACTGCCTGGGCCCCCAGTGCAC |
| | | CAGATGCGAGAAGGACTGCAGACCCGGCCAGGAACTG |
| | | ACCAAGCAGGGCTGTAAGACCTGCAGCCTGGGCACCTT |
| | | CAACGACCAGAACGGGACCGGCGTGTGCCGGCCTTGG |
| | | ACCAATTGCAGCCTGGACGGGAGAAGCGTGCTGAAAA |
| | | CCGGCACCACCGAGAAGGACGTCGTGTGCGGCCCTCCC |
| | | GTGGTGTCCTTCAGCCCTAGCACCACCATCAGCGTGAC |
| | | CCCTGAAGGCGGCCCTGGCGGACACTCTCTGCAGGTCC |
| | | TGGTCGACGAACAGTTATATTTTCAGGGCGGCTCACCC |
| | | AAATCTGCAGACAAAACTCACACATGCCCACCGTGCCC |
| | | AGCACCTGAACTCCTGGGGGGACCGTCAGTCTTCCTCT |
| | | TCCCCCCAAAACCCAAGGACACCCTCATGATCTCCCGG |
| | | ACCCCTGAGGTCACATGCGTGGTGGTGGACGTGAGCCA |
| | | CGAAGACCCTGAGGTCAAGTTCAACTGGTACGTGGACG |
| | | GCGTGGAGGTGCATAATGCCAAGACAAAGCCGCGGGA |
| | | GGAGCAGTACAACAGCACGTACCGTGTGGTCAGCGTCC |
| | | TCACCGTCCTGCACCAGGACTGGCTGAATGGCAAGGAG |
| | | TACAAGTGCAAGGTCTCCAACAAAGCCCTCCCAGCCCC |
| | | CATCGAGAAAACCATCTCCAAAGCCAAAGGGCAGCCC |
| | | CGAGAACCACAGGTGTACACCCTGCCCCCATGCCGGGA |
| | | TGAGCTGACCAAGAACCAGGTCAGCCTGTGGTGCCTGG |
| | | TCAAAGGCTTCTATCCCAGCGACATCGCCGTGGAGTGG |
| | | GAGAGCAATGGGCAGCCGGAGAACAACTACAAGACCA |
| | | CGCCTCCCGTGCTGGACTCCGACGGCTCCTTCTTCCTCT |
| | | ACAGCAAGCTCACCGTGGACAAGAGCAGGTGGCAGCA |
| | | GGGGAACGTCTTCTCATGCTCCGTGATGCATGAGGCTC |
| | | TGCACAACCACTACACGCAGAAGAGCCTCTCCCTGTCT |
| | | CCGGGTAAATCCGGAGGCCTGAACGACATCTTCGAGGC |
| | | CCAGAAGATTGAATGGCACGAG |
| 99 | Fc hole chain | see Table 2 |
| 245 | human 4-1BB | LQDPCSNCPAGTFCDNNRNQICSPCPPNSFSSAGGQRTCDI |
| | antigen Fc knob | CRQCKGVFRTRKECSSTSNAECDCTPGFHCLGAGCSMCE |
| | chain | QDCKQGQELTKKGCKDCCFGTFNDQKRGICRPWTNCSL |
| | | DGKSVLVNGTKERDVVCGPSPADLSPGASSVTPPAPAREP |
| | | GHSPQVDEQLYFQGGSPKSADKTHTCPPCPAPELLGGPSV |
| | | FLFPPKPKDTLMISRTPEVTCVVVDVSHEDPEVKFNWYV |
| | | DGVEVHNAKTKPREEQYNSTYRVVSVLTVLHQDWLNGK |
| | | EYKCKVSNKALPAPIEKTISKAKGQPREPQVYTLPPCRDE |
| | | LTKNQVSLWCLVKGFYPSDIAVEWESNGQPENNYKTTPP |
| | | VLDSDGSFFLYSKLTVDKSRWQQGNVFSCSVMHEALHN |
| | | HYTQKSLSLSPGKSGGLNDIFEAQKIEWHE |
| 246 | cynomolgus 4- | LQDLCSNCPAGTFCDNNRSQICSPCPPNSFSSAGGQRTCDI |
| | 1BB antigen Fc | CRQCKGVFKTRKECSSTSNAECDCISGYHCLGAECSMCE |
| | knob chain | QDCKQGQELTKKGCKDCCFGTFNDQKRGICRPWTNCSL |
| | | DGKSVLVNGTKERDVVCGPSPADLSPGASSATPPAPAREP |
| | | GHSPQVDEQLYFQGGSPKSADKTHTCPPCPAPELLGGPSV |
| | | FLFPPKPKDTLMISRTPEVTCVVVDVSHEDPEVKFNWYV |
| | | DGVEVHNAKTKPREEQYNSTYRVVSVLTVLHQDWLNGK |
| | | EYKCKVSNKALPAPIEKTISKAKGQPREPQVYTLPPCRDE |
| | | LTKNQVSLWCLVKGFYPSDIAVEWESNGQPENNYKTTPP |
| | | VLDSDGSFFLYSKLTVDKSRWQQGNVFSCSVMHEALHN |
| | | HYTQKSLSLSPGKSGGLNDIFEAQKIEWHE |
| 247 | murine 4-1BB | VQNSCDNCQPGTFCRKYNPVCKSCPPSTFSSIGGQPNCNIC |
| | antigen Fc knob | RVCAGYFRFKKFCSSTHNAECECIEGFHCLGPQCTRCEKD |
| | chain | CRPGQELTKQGCKTCSLGTFNDQNGTGVCRPWTNCSLDG |
| | | RSVLKTGTTEKDVVCGPPVVSFSPSTTISVTPEGGPGGHSL |
| | | QVLVDEQLYFQGGSPKSADKTHTCPPCPAPELLGGPSVFL |
| | | FPPKPKDTLMISRTPEVTCVVVDVSHEDPEVKFNWYVDG |
| | | VEVHNAKTKPREEQYNSTYRVVSVLTVLHQDWLNGKEY |
| | | KCKVSNKALPAPIEKTISKAKGQPREPQVYTLPPCRDELT |
| | | KNQVSLWCLVKGFYPSDIAVEWESNGQPENNYKTTPPVL |
| | | DSDGSFFLYSKLTVDKSRWQQGNVFSCSVMHEALHNHY |
| | | TQKSLSLSPGKSGGLNDIFEAQKIEWHE |

[0831] All 4-1BB-Fc-fusion molecule encoding sequences were cloned into a plasmid vector, which drives expression of the insert from an MPSV promoter and contains a synthetic polyA signal sequence located at the 3′ end of the CDS. In addition, the vector contains an EBV OriP sequence for episomal maintenance of the plasmid.

[0832] For preparation of the biotinylated monomeric antigen/Fc fusion molecules, exponentially growing suspension HEK293 EBNA cells were co-transfected with three vectors encoding the two components of fusion protein (knob and hole chains) as well as BirA, an enzyme necessary for the biotinylation reaction. The corresponding vectors were used at a 2:1:0.05 ratio (“antigen ECD-AcTEV-Fc knob”:“Fc hole”:“BirA”).

[0833] For protein production in 500 ml shake flasks, 400 million HEK293 EBNA cells were seeded 24 hours before transfection. For transfection cells were centrifuged for 5 minutes at 210 g, and the supernatant was replaced by pre-warmed CD CHO medium. Expression vectors were resuspended in 20 mL of CD CHO medium containing 200 μg of vector DNA. After addition of 540 μL of polyethylenimine (PEI), the solution was vortexed for 15 seconds and incubated for 10 minutes at room temperature. Afterwards, cells were mixed with the DNA/PEI solution, transferred to a 500 mL shake flask and incubated for 3 hours at 37° C. in an incubator with a 5% CO₂ atmosphere. After the incubation, 160 mL of F17 medium was added and cells were cultured for 24 hours. The production medium was supplemented with 5 μM kifunensine. One day after transfection, 1 mM valproic acid and 7% Feed were added to the culture. After 7 days of culturing, the cell supernatant was collected by spinning down cells for 15 min at 210 g. The solution was sterile filtered (0.22 μm filter), supplemented with sodium azide to a final concentration of 0.01% (w/v), and kept at 4° C.

[0834] Secreted proteins were purified from cell culture supernatants by affinity chromatography using Protein A, followed by size exclusion chromatography. For affinity chromatography, the supernatant was loaded on a HiTrap ProteinA HP column (CV=5 mL, GE Healthcare) equilibrated with 40 mL 20 mM sodium phosphate, 20 mM sodium citrate pH 7.5. Unbound protein was removed by washing with at least 10 column volumes of 20 mM sodium phosphate, 20 mM sodium citrate, 0.5 M sodium chloride containing buffer (pH 7.5). The bound protein was eluted using a linear pH-gradient of sodium chloride (from 0 to 500 mM) created over 20 column volumes of 20 mM sodium citrate, 0.01% (v/v) Tween-20, pH 3.0. The column was then washed with 10 column volumes of 20 mM sodium citrate, 500 mM sodium chloride, 0.01% (v/v) Tween-20, pH 3.0. The pH of collected fractions was adjusted by adding 1/40 (v/v) of 2M Tris, pH8.0. The protein was concentrated and filtered prior to loading on a HiLoad Superdex 200 column (GE Healthcare) equilibrated with 2 mM MOPS, 150 mM sodium chloride, 0.02% (w/v) sodium azide solution of pH 7.4.

6.2 Selection of 4-1BB-Specific 12B3, 25G7, 11D5, 9B11 and 20G2 Antibodies from Generic F(Ab) Libraries

[0835] The antibodies 11D5, 9B11, and 12B3 with specificity for human and cynomolgus 4-1BB were selected from a generic phage-displayed antibody library (DP88-4) in the Fab format. From the same library, an additional antibody, clone 20G2, with reactivity to murine 4-1BB was selected as well. This library was constructed on the basis of human germline genes using the V-domain pairing Vk1_5 (kappa light chain) and VH1_69 (heavy chain) comprising randomized sequence space in CDR3 of the light chain (L3, 3 different lengths) and CDR3 of the heavy chain (H3, 3 different lengths). Library generation was performed by assembly of 3 PCR-amplified fragments applying splicing by overlapping extension (SOE) PCR. Fragment 1 comprises the 5′ end of the antibody gene including randomized L3, fragment 2 is a central constant fragment spanning from L3 to H3 whereas fragment 3 comprises randomized H3 and the 3′ portion of the antibody gene. The following primer combinations were used to generate these library fragments for DP88-4 library: fragment 1 (forward primer LMB3 combined with reverse primers Vk1_5_L3r_S or Vk1_5_L3r_SY or Vk1_5_L3r_SPY), fragment 2 (forward primer RJH31 combined with reverse primer RJH32) and fragment 3 (forward primers DP88-v4-4 or DP88-v4-6 or DP88-v4-8 combined with reverse primer fdseqlong), respectively. PCR parameters for production of library fragments were 5 min initial denaturation at 94° C., 25 cycles of 1 min 94° C., 1 min 58° C., 1 min 72° C. and terminal elongation for 10 min at 72° C. For assembly PCR, using equimolar ratios of the gel-purified single fragments as template, parameters were 3 min initial denaturation at 94° C. and 5 cycles of 30 s 94° C., 1 min 58° C., 2 min 72° C. At this stage, outer primers (LMB3 and fdseqlong) were added and additional 20 cycles were performed prior to a terminal elongation for 10 min at 72° C. After assembly of sufficient amounts of full length randomized Fab constructs, they were digested NcoI/NheI and ligated into similarly treated acceptor phagemid vector. Purified ligations were used for ˜60 transformations into electrocompetent E. coli TG1. Phagemid particles displaying the Fab library were rescued and purified by PEG/NaCl purification to be used for selections. These library construction steps were repeated three times to obtain a final library size of 4.4×10⁹. Percentages of functional clones, as determined by C-terminal tag detection in dot blot, were 92.6% for the light chain and 93.7% for the heavy chain, respectively.

[0836] The antibody 25G7 with specificity for human and cynomolgus 4-1BB was selected from a generic phage-displayed antibody library (λ-DP47) in the Fab format. This library was constructed on the basis of human germline genes using the V-domain pairing V13_19 (lambda light chain) and VH3_23 (heavy chain) comprising randomized sequence space in CDR3 of the light chain (L3, 3 different lengths) and CDR3 of the heavy chain (H3, 3 different lengths). Library generation was performed by assembly of 3 PCR-amplified fragments applying splicing by overlapping extension (SOE) PCR. Fragment 1 comprises the 5′ end of the antibody gene including randomized L3, fragment 2 is a central constant fragment spanning from L3 to H3 whereas fragment 3 comprises randomized H3 and the 3′ portion of the antibody gene. The following primer combinations were used to generate these library fragments for λ-DP47 library: fragment 1 (forward primer LMB3 combined with reverse primers V1_3_19_L3r_V or V1_3_19_L3r_HV or V1_3_19_L3r_HLV), fragment 2 (forward primer RJH80 combined with reverse primer MS63) and fragment 3 (forward primers DP47-v4-4 or DP47-v4-6 or DP47-v4-8 combined with reverse primer fdseqlong), respectively. PCR parameters for production of library fragments were 5 min initial denaturation at 94° C., 25 cycles of 1 min 94° C., 1 min 58° C., 1 min 72° C. and terminal elongation for 10 min at 72° C. For assembly PCR, using equimolar ratios of the gel-purified single fragments as template, parameters were 3 min initial denaturation at 94° C. and 5 cycles of 30 s 94° C., 1 min 58° C., 2 min 72° C. At this stage, outer primers (LMB3 and fdseqlong) were added and additional 20 cycles were performed prior to a terminal elongation for 10 min at 72° C. After assembly of sufficient amounts of full length randomized Fab constructs, they were digested NcoI/NheI and ligated into similarly treated acceptor phagemid vector. Purified ligations were used for ˜60 transformations into electrocompetent E. coli TG1. Phagemid particles displaying the Fab library were rescued and purified by PEG/NaCl purification to be used for selections. A final library size of 9.5×10⁹ was obtained. Percentages of functional clones, as determined by C-terminal tag detection in dot blot, were 81.1% for the light chain and 83.2% for the heavy chain, respectively.

[0837] Table 41 shows the sequence of generic phage-displayed antibody library (DP88-4), Table 42 provides cDNA and amino acid sequences of library DP88-4 germline template and Table 43 shows the Primer sequences used for generation of DP88-4 germline template.

TABLE 41
Sequence of generic phage-displayed antibody
library (DP88-4)

| SEQ ID | | |
|---|---|---|
| NO: | Description | Sequence |
| 103 | nucleotide | TGAAATACCTATTGCCTACGGCAGCCGCTGGATTGTTATTACT |
| | sequence of | CGCGGCCCAGCCGGCCATGGCCGACATCCAGATGACCCAGTC |
| | pRJH33 | TCCTTCCACCCTGTCTGCATCTGTAGGAGACCGTGTCACCATC |
| | library | ACTTGCCGTGCCAGTCAGAGTATTAGTAGCTGGTTGGCCTGG |
| | template | TATCAGCAGAAACCAGGGAAAGCCCCTAAGCTCCTGATCTAT |
| | DP88-4 | GATGCCTCCAGTTTGGAAAGTGGGGTCCCATCACGTTTCAGC |
| | library; | GGCAGTGGATCCGGGACAGAATTCACTCTCACCATCAGCAGC |
| | complete | TTGCAGCCTGATGATTTTGCAACTTATTACTGCCAACAGTATA |
| | Fab coding | ATAGTTATTCTACGTTTGGCCAGGGCACCAAAGTCGAGATCA |
| | region | AGCGTACGGTGGCTGCACCATCTGTCTTCATCTTCCCGCCATC |
| | comprising | TGATGAGCAGTTGAAATCTGGAACTGCCTCTGTTGTGTGCCTG |
| | PelB leader | CTGAATAACTTCTATCCCAGAGAGGCCAAAGTACAGTGGAAG |
| | sequence + | GTGGATAACGCCCTCCAATCGGGTAACTCCCAGGAGAGTGTC |
| | Vk1_5 | ACAGAGCAGGACAGCAAGGACAGCACCTACAGCCTCAGCAG |
| | kappa V- | CACCCTGACGCTGAGCAAAGCAGACTACGAGAAACACAAAG |
| | domain + | TCTACGCCTGCGAAGTCACCCATCAGGGCCTGAGCTCGCCCG |
| | CL constant | TCACAAAGAGCTTCAACAGGGGAGAGTGTGGAGCCGCAGAA |
| | domain for | CAAAAACTCATCTCAGAAGAGGATCTGAATGGAGCCGCAGA |
| | light chain | CTACAAGGACGACGACGACAAGGGTGCCGCATAATAAGGCG |
| | and PelB + | CGCCAATTCTATTTCAAGGAGACAGTCATATGAAATACCTGC |
| | VH1_69 V- | TGCCGACCGCTGCTGCTGGTCTGCTGCTCCTCGCTGCCCAGCC |
| | domain + | GGCGATGGCCCAGGTGCAATTGGTGCAGTCTGGGGCTGAGGT |
| | CH1 | GAAGAAGCCTGGGTCCTCGGTGAAGGTCTCCTGCAAGGCCTC |
| | constant | CGGAGGCACATTCAGCAGCTACGCTATAAGCTGGGTGCGACA |
| | domain for | GGCCCCTGGACAAGGGCTCGAGTGGATGGGAGGGATCATCCC |
| | heavy chain | TATCTTTGGTACAGCAAACTACGCACAGAAGTTCCAGGGCAG |
| | including | GGTCACCATTACTGCAGACAAATCCACGAGCACAGCCTACAT |
| | tags | GGAGCTGAGCAGCCTGAGATCTGAGGACACCGCCGTGTATTA |
| | | CTGTGCGAGACTATCCCCAGGCGGTTACTATGTTATGGATGC |
| | | CTGGGGCCAAGGGACCACCGTGACCGTCTCCTCAGCTAGCAC |
| | | CAAAGGCCCATCGGTCTTCCCCCTGGCACCCTCCTCCAAGAG |
| | | CACCTCTGGGGGCACAGCGGCCCTGGGCTGCCTGGTCAAGGA |
| | | CTACTTCCCCGAACCGGTGACGGTGTCGTGGAACTCAGGCGC |
| | | CCTGACCAGCGGCGTGCACACCTTCCCGGCTGTCCTACAGTC |
| | | CTCAGGACTCTACTCCCTCAGCAGCGTGGTGACCGTGCCCTCC |
| | | AGCAGCTTGGGCACCCAGACCTACATCTGCAACGTGAATCAC |
| | | AAGCCCAGCAACACCAAAGTGGACAAGAAAGTTGAGCCCAA |
| | | ATCTTGTGACGCGGCCGCAAGCACTAGTGCCCATCACCATCA |
| | | CCATCACGCCGCGGCA |

TABLE 42
cDNA and amino acid sequences of library DP88-4 germline template

| SEQ ID | | |
|---|---|---|
| NO: | Description | Sequence |
| 104 | nucleotide sequence of Fab | see Table 4 |
| | light chain Vk1_5 | |
| 105 | Fab light chain Vk1_5 | see Table 4 |
| 106 | nucleotide sequence of Fab | see Table 4 |
| | heavy chain VH1_69 | |
| 107 | Fab heavy chain VH1_69 | see Table 4 |

TABLE 43
Primer sequences used for generation of DP88-4 library

| SEQ | | |
|---|---|---|
| ID NO: | Primer name | Primer sequence 5′-3′ |
| 108 | LMB3 | CAGGAAACAGCTATGACCATGATTAC |
| 109 | Vk1_5_L3r_S | [chemical structure] |
| | | [chemical structure] |
| | | underlined: 60% original base and 40% randomization as M. |
| | | bolded and italic: 60% original base and 40% randomization as N |
| 110 | Vk1_5_L3r_SY | [chemical structure] |
| | | [chemical structure] |
| | | underlined: 60% original base and 40% randomization as M. |
| | | bolded and italic: 60% original base and 40% randomization as N |
| 111 | Vk1_5_L3r_SPY | [chemical structure] |
| | | [chemical structure] |
| | | underlined: 60% original base and 40% randomization as M. |
| | | bolded and italic: 60% original base and 40% randomization as N |
| 112 | RJH31 | ACGTTTGGCCAGGGCACCAAAGTCGAG |
| 113 | RJH32 | TCTCGCACAGTAATACACGGCGGTGTCC |
| 114 | DP88-v4-4 | GGACACCGCCGTGTATTACTGTGCGAGA-1-2-2-3-4- |
| | | GAC-TAC-TGGGGCCAAGGGACCACCGTGACCGTCTCC |
| | | 1: G/D = 20%, E/V/S = 10%, A/P/R/L/T/Y = 5%; |
| | | 2: G/Y/S = 15%, A/D/T/R/P/L/V/N/W/F/I/E = 4,6%; |
| | | 3: G/A/Y = 20%, P/W/S/D/T = 8%; |
| | | 4: F = 46%, L/M = 15%, G/I/Y = 8%. |
| 115 | DP88-v4-6 | GGACACCGCCGTGTATTACTGTGCGAGA-1-2-2-2-2-3-4- |
| | | GAC-TAC-TGGGGCCAAGGGACCACCGTGACCGTCTCC |
| | | 1: G/D = 20%, E/V/S = 10%, A/P/R/L/T/Y = 5%; |
| | | 2: G/Y/S = 15%, A/D/T/R/P/L/V/N/W/F/I/E = 4,6%; |
| | | 3: G/A/Y = 20%, P/W/S/D/T = 8%; |
| | | 4: F = 46%, L/M = 15%, G/I/Y = 8%. |
| 116 | DP88-v4-8 | GGACACCGCCGTGTATTACTGTGCGAGA-1-2-2-2-2-2-2-3-4- |
| | | GAC-TAC-TGGGGCCAAGGGACCACCGTGACCGTCTCC |
| | | 1: G/D = 20%, E/V/S = 10%, A/P/R/L/T/Y = 5%; |
| | | 2: G/Y/S = 15%, A/D/T/R/P/L/V/N/W/F/I/E = 4,6%; |
| | | 3: G/A/Y = 20%, P/W/S/D/T = 8%; |
| | | 4: F = 46%, L/M = 15%, G/I/Y = 8%. |
| 117 | fdseqlong | GACGTTAGTAAATGAATTTTCTGTATGAGG |

[0838] Table 44 shows the sequence of generic phage-displayed lambda-DP47 library (V13_19/VH3_23) template used for PCRs. Table 45 provides cDNA and amino acid sequences of lambda-DP47 library (V13_19/VH3_23) germline template and Table 46 shows the Primer sequences used for generation of lambda-DP47 library (V13_19/VH3_23).

TABLE 44
Sequence of generic phage-displayed lambda-DP47 library
(V13_19/VH3_23) template used for PCRs

| SEQ | | |
|---|---|---|
| ID | | |
| NO: | Description | Sequence |
| 129 | pRJH53 | ATGAAATACCTATTGCCTACGGCAGCCGCTGGATTGTTATTAC |
| | library | TCGCGGCCCAGCCGGCCATGGCCTCGTCTGAGCTGACTCAGG |
| | template of | ACCCTGCTGTGTCTGTGGCCTTGGGACAGACAGTCAGGATCA |
| | lambda- | CATGCCAAGGAGACAGCCTCAGAAGTTATTATGCAAGCTGGT |
| | DP47 | ACCAGCAGAAGCCAGGACAGGCCCCTGTACTTGTCATCTATG |
| | library | GTAAAAACAACCGGCCCTCAGGGATCCCAGACCGATTCTCTG |
| | V13_19/VH3_23; | GCTCCAGCTCAGGAAACACAGCTTCCTTGACCATCACTGGGG |
| | complete | CTCAGGCGGAAGATGAGGCTGACTATTACTGTAACTCCCGTG |
| | Fab coding | ATAGTAGCGGTAATCATGTGGTATTCGGCGGAGGGACCAAGC |
| | region | TGACCGTCCTAGGACAACCCAAGGCTGCCCCCAGCGTGACCC |
| | comprising | TGTTCCCCCCCAGCAGCGAGGAATTGCAGGCCAACAAGGCCA |
| | PelB leader | CCCTGGTCTGCCTGATCAGCGACTTCTACCCAGGCGCCGTGA |
| | sequence + | CCGTGGCCTGGAAGGCCGACAGCAGCCCCGTGAAGGCCGGC |
| | V13_19 | GTGGAGACCACCACCCCCAGCAAGCAGAGCAACAACAAGTA |
| | lambda V- | CGCCGCCAGCAGCTACCTGAGCCTGACCCCCGAGCAGTGGAA |
| | domain + | GAGCCACAGGTCCTACAGCTGCCAGGTGACCCACGAGGGCA |
| | CL constant | GCACCGTGGAGAAAACCGTGGCCCCCACCGAGTGCAGCGGA |
| | domain for | GCCGCAGAACAAAAACTCATCTCAGAAGAGGATCTGAATGG |
| | light chain | AGCCGCAGACTACAAGGACGACGACGACAAGGGTGCCGCAT |
| | and PelB + | AATAAGGCGCGCCAATTCTATTTCAAGGAGACAGTCATATGA |
| | VH3_23 V- | AATACCTGCTGCCGACCGCTGCTGCTGGTCTGCTGCTCCTCGC |
| | domain + | TGCCCAGCCGGCGATGGCCGAGGTGCAATTGCTGGAGTCTGG |
| | CH1 | GGGAGGCTTGGTACAGCCTGGGGGGTCCCTGAGACTCTCCTG |
| | constant | TGCAGCCTCCGGATTCACCTTTAGCAGTTATGCCATGAGCTGG |
| | domain for | GTCCGCCAGGCTCCAGGGAAGGGGCTGGAGTGGGTCTCAGCT |
| | heavy chain | ATTAGTGGTAGTGGTGGTAGCACATACTACGCAGACTCCGTG |
| | including | AAGGGCCGGTTCACCATCTCCAGAGACAATTCCAAGAACACG |
| | tags | CTGTATCTGCAGATGAACAGCCTGAGAGCCGAGGACACGGCC |
| | | GTATATTACTGTGCGAAACCGTTTCCGTATTTTGACTACTGGG |
| | | GCCAAGGAACCCTGGTCACCGTCTCGAGTGCTAGCACCAAAG |
| | | GCCCATCGGTCTTCCCCCTGGCACCCTCCTCCAAGAGCACCTC |
| | | TGGGGGCACAGCGGCCCTGGGCTGCCTGGTCAAGGACTACTT |
| | | CCCCGAACCGGTGACGGTGTCGTGGAACTCAGGCGCCCTGAC |
| | | CAGCGGCGTGCACACCTTCCCGGCTGTCCTACAGTCCTCAGG |
| | | ACTCTACTCCCTCAGCAGCGTGGTGACCGTGCCCTCCAGCAG |
| | | CTTGGGCACCCAGACCTACATCTGCAACGTGAATCACAAGCC |
| | | CAGCAACACCAAAGTGGACAAGAAAGTTGAGCCCAAATCTT |
| | | GTGACGCGGCCGCAAGCACTAGTGCCCATCACCATCACCATC |
| | | ACGCCGCGGCA |

TABLE 45
cDNA and amino acid sequences of lambda-DP47 library
(V13_19/VH3_23) germline template

| SEQ ID | | |
|---|---|---|
| NO: | Description | Sequence |
| 130 | nucleotide sequence of | see Table 10 |
| | Fab light chain V13_19 | |
| 131 | Fab light chain V13_19 | see Table 10 |
| 121 | nucleotide sequence of | see Table 7 |
| | Fab heavy chain VH3_23 | |
| 122 | Fab heavy chain VH3_23 | see Table 7 |
| | (DP47) | |

TABLE 46
Primer sequences used for generation of lambda-DP47 library (V13_19/VH3_23)

| SEQ | | |
|---|---|---|
| ID NO: | Primer name | Primer sequence 5′-3′ |
| 132 | LMB3 | CAGGAAACAGCTATGACCATGATTAC |
| 133 | V1_3_19_L3r_V | [chemical structure] |
| | | [chemical structure] |
| | | GGAGTTACAGTAATAGTCAGCCTCATCTTCCGC |
| | | underlined: 60% original base and 40% randomization as M |
| | | bold and italic: 60% original base and 40% randomization as N |
| 134 | V1_3_19_L3r_HV | [chemical structure] |
| | | [chemical structure] |
| | | GGAGTTACAGTAATAGTCAGCCTCATCTTCCGC |
| | | underlined: 60% original base and 40% randomization as M |
| | | bolded and italic: 60% original base and 40% randomization as N |
| 135 | V1_3_19_L3r_HLV | [chemical structure] |
| | | [chemical structure] |
| | | GGAGTTACAGTAATAGTCAGCCTCATCTTC CGC |
| | | underlined: 60% original base and 40% randomization as M |
| | | bolded and italic: 60% original base and 40% randomization as N |
| 136 | RJH80 | TTCGGCGGAGGGACCAAGCTGACCGTCC |
| 248 | MS63 | TTTCGCACAGTAATATACGGCCGTGTCC |
| 125 | DP47-v4-4 | CGAGGACACGGCCGTATATTACTGTGCG-5-1-2-2-3-4- |
| | | GAC-TAC-TGGGGCCAAGGAACCCTGGTCACCGTCTCG |
| 126 | DP47-v4-6 | CGAGGACACGGCCGTATATTACTGTGCG-5-1-2-2-2-2-3-4- |
| | | GAC-TAC-TGGGGCCAAGGAACCCTGGTCACCGTCTCG |
| 127 | DP47-v4-8 | CGAGGACACGGCCGTATATTACTGTGCG-5-1-2-2-2-2-2-2- |
| | | 3-4-GAC-TAC-TGGGGCCAAGGAACCCTGGTCACCGTCTCG |
| 128 | fdseqlong | GACGTTAGTAAATGAATTTTCTGTATGAGG |

1: G/D = 20%, E/V/S = 10%, A/P/R/L/T/Y= 5%;
2: G/Y/S = 15%, A/D/T/R/P/LN/N/W/F/I/E = 4,6%;
3: G/A/Y = 20%, P/W/S/D/T = 8%;
4: F = 46%, L/M = 15%, G/I/Y = 8%; 5: K = 70%, R = 30%.

[0839] Human, murine and cynomolgus 4-1BB (CD137) as antigens for the phage display selections and ELISA- and SPR-based screenings were transiently expressed as N-terminal monomeric Fc-fusion in HEK EBNA cells and in vivo site-specifically biotinylated via co-expression of BirA biotin ligase at the avi-tag recognition sequence located at the C-terminus of the Fc portion carrying the receptor chain (Fc knob chain).

[0840] Selection rounds (biopanning) were performed in solution according to the following procedure. First step, pre-clearing of −10¹² phagemid particles on maxisorp plates coated with 10 ug/ml of an unrelated human IgG to deplete the libraries of antibodies recognizing the Fc-portion of the antigen; second, incubation of the non-binding phagemid particles with 100 nM biotinylated human or murine 4-1BB for 0.5 h in the presence of 100 nM unrelated non-biotinylated Fc knob-into-hole construct for further depletion of Fc-binders in a total volume of 1 ml; third, capture of biotinylated hu 4-1BB and attached specifically binding phage by transfer to 4 wells of a neutravidin pre-coated microtiter plate for 10 min (in rounds 1 & 3); fourth, washing of respective wells using 5× PBS/Tween20 and 5×PBS; fifth, elution of phage particles by addition of 250 ul 100 mM TEA (triethylamine) per well for 10 min and neutralization by addition of 500 ul 1M Tris/HCl pH 7.4 to the pooled eluates from 4 wells; sixth, post-clearing of neutralized eluates by incubation on neutravidin pre-coated microtiter plate with 100 nM biotin-captured Fc knob-into-hole construct for final removal of Fc-binders; seventh, re-infection of log-phase E. coli TG1 cells with the supernatant of eluted phage particles, infection with helperphage VCSM13, incubation on a shaker at 30° C. over night and subsequent PEG/NaCl precipitation of phagemid particles to be used in the next selection round. Selections were carried out over 3 or 4 rounds using constant antigen concentrations of 100 nM. In rounds 2 and 4, in order to avoid enrichment of binders to neutravidin, capture of antigen: phage complexes was performed by addition of 5.4×10⁷ streptavidin-coated magnetic beads. Specific binders were identified by ELISA as follows: 100 μl of 25 nM biotinylated human or murine 4-1BB and 10 ug/ml of human IgG were coated on neutravidin plates and maxisorp plates, respectively. Fab-containing bacterial supernatants were added and binding Fabs were detected via their Flag-tags using an anti-Flag/HRP secondary antibody. Clones exhibiting signals on human or murine 4-1BB and being negative on human IgG were short-listed for further analyses and were also tested in a similar fashion against the remaining two species of 4-1BB. They were bacterially expressed in a 0.5 liter culture volume, affinity purified and further characterized by SPR-analysis using BioRad's ProteOn XPR36 biosensor.

[0841] Clones 12B3, 25G7, 11D5 and 9B11 were identified as human 4-1BB-specific binder through the procedure described above. Clone 20G2 was identified as murine 4-1BB-specific binder through the procedure described above. The cDNA sequences of their variable regions are shown in Table 47 below, the corresponding amino acid sequences can be found in Table C.

TABLE 47
Variable region base pair sequences for phage-
derived anti-4-1BB antibodies. Underlined are
the complementary determining regions (CDRs).

| | SEQ ID | |
|---|---|---|
| Clone | NO: | Sequence |
| 12B3 | 277 (VL) | GACATCCAGATGACCCAGTCTCCTTCCACCCTGTCTGCATCTGTA |
| | | GGAGACCGTGTCACCATCACTTGCCGTGCCAGTCAGAGTATTAG |
| | | TAGCTGGTTGGCCTGGTATCAGCAGAAACCAGGGAAAGCCCCTA |
| | | AGCTCCTGATCTATGATGCCTCCAGTTTGGAAAGTGGGGTCCCAT |
| | | CACGTTTCAGCGGCAGTGGATCCGGGACAGAATTCACTCTCACC |
| | | ATCAGCAGCTTGCAGCCTGATGATTTTGCAACTTATTACTGCCAA |
| | | CAGTATCATTCGTATCCGCAGACGTTTGGCCAGGGCACCAAAGT |
| | | CGAGATCAAG |
| | 278 (VH) | CAGGTGCAATTGGTGCAGTCTGGGGCTGAGGTGAAGAAGCCTGG |
| | | GTCCTCGGTGAAGGTCTCCTGCAAGGCCTCCGGAGGCACATTCA |
| | | GCAGCTACGCTATAAGCTGGGTGCGACAGGCCCCTGGACAAGGG |
| | | CTCGAGTGGATGGGAGGGATCATCCCTATCTTTGGTACAGCAAA |
| | | CTACGCACAGAAGTTCCAGGGCAGGGTCACCATTACTGCAGACA |
| | | AATCCACGAGCACAGCCTACATGGAGCTGAGCAGCCTGAGATCT |
| | | GAGGACACCGCCGTGTATTACTGTGCGAGATCTGAATTCCGTTTC |
| | | TACGCTGACTTCGACTACTGGGGCCAAGGGACCACCGTGACCGT |
| | | CTCCTCA |
| 25G7 | 279 (VL) | TCGTCTGAGCTGACTCAGGACCCTGCTGTGTCTGTGGCCTTGGGA |
| | | CAGACAGTCAGGATCACATGCCAAGGAGACAGCCTCAGAAGTT |
| | | ATTATGCAAGCTGGTACCAGCAGAAGCCAGGACAGGCCCCTGTA |
| | | CTTGTCATCTATGGTAAAAACAACCGGCCCTCAGGGATCCCAGA |
| | | CCGATTCTCTGGCTCCAGCTCAGGAAACACAGCTTCCTTGACCAT |
| | | CACTGGGGCTCAGGCGGAAGATGAGGCTGACTATTACTGTAACT |
| | | CCCTTGATAGGCGCGGTATGTGGGTATTCGGCGGAGGGACCAAG |
| | | CTGACCGTC |
| | 280 (VH) | GAGGTGCAATTGTTGGAGTCTGGGGGAGGCTTGGTACAGCCTGG |
| | | GGGGTCCCTGAGACTCTCCTGTGCAGCCTCCGGATTCACCTTTAG |
| | | CAGTTATGCCATGAGCTGGGTCCGCCAGGCTCCAGGGAAGGGGC |
| | | TGGAGTGGGTCTCAGCTATTAGTGGTAGTGGTGGTAGCACATAC |
| | | TACGCAGACTCCGTGAAGGGCCGGTTCACCATCTCCAGAGACAA |
| | | TTCCAAGAACACGCTGTATCTGCAGATGAACAGCCTGAGAGCCG |
| | | AGGACACGGCCGTATATTACTGTGCGCGTGACGACCCGTGGCCG |
| | | CCGTTCGACTACTGGGGCCAAGGAACCCTGGTCACCGTCTCGAGT |
| 11D5 | 281 (VL) | GACATCCAGATGACCCAGTCTCCTTCCACCCTGTCTGCATCTGTA |
| | | GGAGACCGTGTCACCATCACTTGCCGTGCCAGTCAGAGTATTAG |
| | | TAGCTGGTTGGCCTGGTATCAGCAGAAACCAGGGAAAGCCCCTA |
| | | AGCTCCTGATCTATGATGCCTCCAGTTTGGAAAGTGGGGTCCCAT |
| | | CACGTTTCAGCGGCAGTGGATCCGGGACAGAATTCACTCTCACC |
| | | ATCAGCAGCTTGCAGCCTGATGATTTTGCAACTTATTACTGCCAA |
| | | CAGCTTAATTCGTATCCTCAGACGTTTGGCCAGGGCACCAAAGT |
| | | CGAGATCAAG |
| | 282 (VH) | CAGGTGCAATTGGTGCAGTCTGGGGCTGAGGTGAAGAAGCCTGG |
| | | GTCCTCGGTGAAGGTCTCCTGCAAGGCCTCCGGAGGCACATTCA |
| | | GCAGCTACGCTATAAGCTGGGTGCGACAGGCCCCTGGACAAGGG |
| | | CTCGAGTGGATGGGAGGGATCATCCCTATCTTTGGTACAGCAAA |
| | | CTACGCACAGAAGTTCCAGGGCAGGGTCACCATTACTGCAGACA |
| | | AATCCACGAGCACAGCCTACATGGAGCTGAGCAGCCTGAGATCT |
| | | GAGGACACCGCCGTGTATTACTGTGCGAGATCTACTCTGATCTA |
| | | CGGTTACTTCGACTACTGGGGCCAAGGGACCACCGTGACCGTCT |
| | | CCTCA |
| 9B11 | 283 (VL) | GACATCCAGATGACCCAGTCTCCTTCCACCCTGTCTGCATCTGTA |
| | | GGAGACCGTGTCACCATCACTTGCCGTGCCAGTCAGAGTATTAG |
| | | TAGCTGGTTGGCCTGGTATCAGCAGAAACCAGGGAAAGCCCCTA |
| | | AGCTCCTGATCTATGATGCCTCCAGTTTGGAAAGTGGGGTCCCAT |
| | | CACGTTTCAGCGGCAGTGGATCCGGGACAGAATTCACTCTCACC |
| | | ATCAGCAGCTTGCAGCCTGATGATTTTGCAACTTATTACTGCCAA |
| | | CAGGTTAATTCTTATCCGCAGACGTTTGGCCAGGGCACCAAAGT |
| | | CGAGATCAAG |
| | 284 (VH) | CAGGTGCAATTGGTGCAGTCTGGGGCTGAGGTGAAGAAGCCTGG |
| | | GTCCTCGGTGAAGGTCTCCTGCAAGGCCTCCGGAGGCACATTCA |
| | | GCAGCTACGCTATAAGCTGGGTGCGACAGGCCCCTGGACAAGGG |
| | | CTCGAGTGGATGGGAGGGATCATCCCTATCTTTGGTACAGCAAA |
| | | CTACGCACAGAAGTTCCAGGGCAGGGTCACCATTACTGCAGACA |
| | | AATCCACGAGCACAGCCTACATGGAGCTGAGCAGCCTGAGATCT |
| | | GAGGACACCGCCGTGTATTACTGTGCGAGATCTTCTGGTGCTTAC |
| | | CCGGGTTACTTCGACTACTGGGGCCAAGGGACCACCGTGACCGT |
| | | CTCCTCA |
| 20G2 | 285 (VL) | GACATCCAGATGACCCAGTCTCCATCCACCCTGTCTGCATCTGTA |
| | | GGAGACCGTGTCACCATCACTTGCCGTGCCAGTCAGAGTATTAG |
| | | TAGCTGGTTGGCCTGGTATCAGCAGAAACCAGGGAAAGCCCCTA |
| | | AGCTCCTGATCTATGATGCCTCCAGTTTGGAAAGTGGGGTCCCAT |
| | | CACGTTTCAGCGGCAGTGGATCCGGGACAGAATTCACTCTCACC |
| | | ATCAGCAGCTTGCAGCCTGATGATTTTGCAACTTATTACTGCCAA |
| | | CAGCAGCACTCGTATTATACGTTTGGCCAGGGCACCAAAGTCGA |
| | | GATCAAG |
| | 286 (VH) | CAGGTGCAATTGGTGCAGTCTGGGGCTGAGGTGAAGAAGCCTGG |
| | | GTCCTCGGTGAAGGTCTCCTGCAAGGCCTCCGGAGGCACATTCA |
| | | GCAGCTACGCTATAAGCTGGGTGCGACAGGCCCCTGGACAAGGG |
| | | CTCGAGTGGATGGGAGGGATCATCCCTATCTTTGGTACAGCAAA |
| | | CTACGCACAGAAGTTCCAGGGCAGGGTCACCATTACTGCAGACA |
| | | AATCCACGAGCACAGCCTACATGGAGCTGAGCAGCCTGAGATCT |
| | | GAGGACACCGCCGTGTATTACTGTGCGAGATCTTACTACTGGGA |
| | | ATCTTACCCGTTCGACTACTGGGGCCAAGGGACCACCGTGACCG |
| | | TCTCCAGC |

### 6.3 Preparation, Purification and Characterization of Anti-4-1BB IgG1 P329G LALA Antibodies

[0842] The variable regions of heavy and light chain DNA sequences of selected anti-4-1BB binders were subcloned in frame with either the constant heavy chain or the constant light chain of human IgG1. The Pro329Gly, Leu234Ala and Leu235Ala mutations have been introduced in the constant region of the knob and hole heavy chains to abrogate binding to Fc gamma receptors according to the method described in International Patent Appl. Publ. No. WO 2012/130831 A1.

[0843] The nucleotide and amino acid sequences of the anti-4-1BB clones are shown in Table 48. All anti-4-1BB-Fc-fusion encoding sequences were cloned into a plasmid vector, which drives expression of the insert from an MPSV promoter and contains a synthetic polyA signal sequence located at the 3′ end of the CDS. In addition, the vector contains an EBV OriP sequence for episomal maintenance of the plasmid.

TABLE 48
Sequences of anti-4-1BB clones in P329GLALA human
IgG1 format

| Clone | SEQ ID No. | Sequence |
|---|---|---|
| 12B3 | 287 | GACATCCAGATGACCCAGTCTCCTTCCACCCTGTCTGCATCT |
| | (nucleotide | GTAGGAGACCGTGTCACCATCACTTGCCGTGCCAGTCAGAG |
| | sequence light | TATTAGTAGCTGGTTGGCCTGGTATCAGCAGAAACCAGGGA |
| | chain) | AAGCCCCTAAGCTCCTGATCTATGATGCCTCCAGTTTGGAA |
| | | AGTGGGGTCCCATCACGTTTCAGCGGCAGTGGATCCGGGAC |
| | | AGAATTCACTCTCACCATCAGCAGCTTGCAGCCTGATGATTT |
| | | TGCAACTTATTACTGCCAACAGTATCATTCGTATCCGCAGAC |
| | | GTTTGGCCAGGGCACCAAAGTCGAGATCAAGCGTACGGTGG |
| | | CTGCACCATCTGTCTTCATCTTCCCGCCATCTGATGAGCAGT |
| | | TGAAATCTGGAACTGCCTCTGTTGTGTGCCTGCTGAATAACT |
| | | TCTATCCCAGAGAGGCCAAAGTACAGTGGAAGGTGGATAAC |
| | | GCCCTCCAATCGGGTAACTCCCAGGAGAGTGTCACAGAGCA |
| | | GGACAGCAAGGACAGCACCTACAGCCTCAGCAGCACCCTG |
| | | ACGCTGAGCAAAGCAGACTACGAGAAACACAAAGTCTACG |
| | | CCTGCGAAGTCACCCATCAGGGCCTGAGCTCGCCCGTCACA |
| | | AAGAGCTTCAACAGGGGAGAGTGT |
| | 288 | CAGGTGCAATTGGTGCAGTCTGGGGCTGAGGTGAAGAAGCC |
| | (nucleotide | TGGGTCCTCGGTGAAGGTCTCCTGCAAGGCCTCCGGAGGCA |
| | sequence heavy | CATTCAGCAGCTACGCTATAAGCTGGGTGCGACAGGCCCCT |
| | chain) | GGACAAGGGCTCGAGTGGATGGGAGGGATCATCCCTATCTT |
| | | TGGTACAGCAAACTACGCACAGAAGTTCCAGGGCAGGGTCA |
| | | CCATTACTGCAGACAAATCCACGAGCACAGCCTACATGGAG |
| | | CTGAGCAGCCTGAGATCTGAGGACACCGCCGTGTATTACTG |
| | | TGCGAGATCTGAATTCCGTTTCTACGCTGACTTCGACTACTG |
| | | GGGCCAAGGGACCACCGTGACCGTCTCCTCAGCTAGCACCA |
| | | AGGGCCCATCGGTCTTCCCCCTGGCACCCTCCTCCAAGAGC |
| | | ACCTCTGGGGGCACAGCGGCCCTGGGCTGCCTGGTCAAGGA |
| | | CTACTTCCCCGAACCGGTGACGGTGTCGTGGAACTCAGGCG |
| | | CCCTGACCAGCGGCGTGCACACCTTCCCGGCTGTCCTACAG |
| | | TCCTCAGGACTCTACTCCCTCAGCAGCGTGGTGACCGTGCCC |
| | | TCCAGCAGCTTGGGCACCCAGACCTACATCTGCAACGTGAA |
| | | TCACAAGCCCAGCAACACCAAGGTGGACAAGAAAGTTGAG |
| | | CCCAAATCTTGTGACAAAACTCACACATGCCCACCGTGCCC |
| | | AGCACCTGAAGCTGCAGGGGGACCGTCAGTCTTCCTCTTCC |
| | | CCCCAAAACCCAAGGACACCCTCATGATCTCCCGGACCCCT |
| | | GAGGTCACATGCGTGGTGGTGGACGTGAGCCACGAAGACCC |
| | | TGAGGTCAAGTTCAACTGGTACGTGGACGGCGTGGAGGTGC |
| | | ATAATGCCAAGACAAAGCCGCGGGAGGAGCAGTACAACAG |
| | | CACGTACCGTGTGGTCAGCGTCCTCACCGTCCTGCACCAGG |
| | | ACTGGCTGAATGGCAAGGAGTACAAGTGCAAGGTCTCCAAC |
| | | AAAGCCCTCGGCGCCCCCATCGAGAAAACCATCTCCAAAGC |
| | | CAAAGGGCAGCCCCGAGAACCACAGGTGTACACCCTGCCCC |
| | | CATCCCGGGATGAGCTGACCAAGAACCAGGTCAGCCTGACC |
| | | TGCCTGGTCAAAGGCTTCTATCCCAGCGACATCGCCGTGGA |
| | | GTGGGAGAGCAATGGGCAGCCGGAGAACAACTACAAGACC |
| | | ACGCCTCCCGTGCTGGACTCCGACGGCTCCTTCTTCCTCTAC |
| | | AGCAAGCTCACCGTGGACAAGAGCAGGTGGCAGCAGGGGA |
| | | ACGTCTTCTCATGCTCCGTGATGCATGAGGCTCTGCACAACC |
| | | ACTACACGCAGAAGAGCCTCTCCCTGTCTCCGGGTAAA |
| | 289 | DIQMTQSPSTLSASVGDRVTITCRASQSISSWLAWYQQKPGKA |
| | (Light chain) | PKLLIYDASSLESGVPSRFSGSGSGTEFTLTISSLQPDDFATYYC |
| | | QQYHSYPQTFGQGTKVEIKRTVAAPSVFIFPPSDEQLKSGTASV |
| | | VCLLNNFYPREAKVQWKVDNALQSGNSQESVTEQDSKDSTYS |
| | | LSSTLTLSKADYEKHKVYACEVTHQGLSSPVTKSFNRGEC |
| | 290 | QVQLVQSGAEVKKPGSSVKVSCKASGGTFSSYAISWVRQAPG |
| | (Heavy chain) | QGLEWMGGIIPIFGTANYAQKFQGRVTITADKSTSTAYMELSS |
| | | LRSEDTAVYYCARSEFRFYADFDYWGQGTTVTVSSASTKGPS |
| | | VFPLAPSSKSTSGGTAALGCLVKDYFPEPVTVSWNSGALTSGV |
| | | HTFPAVLQSSGLYSLSSVVTVPSSSLGTQTYICNVNHKPSNTKV |
| | | DKKVEPKSCDKTHTCPPCPAPEAAGGPSVFLFPPKPKDTLMISR |
| | | TPEVTCVVVDVSHEDPEVKFNWYVDGVEVHNAKTKPREEQY |
| | | NSTYRVVSVLTVLHQDWLNGKEYKCKVSNKALGAPIEKTISK |
| | | AKGQPREPQVYTLPPSRDELTKNQVSLTCLVKGFYPSDIAVEW |
| | | ESNGQPENNYKTTPPVLDSDGSFFLYSKLTVDKSRWQQGNVFS |
| | | CSVMHEALHNHYTQKSLSLSPGK |
| 25G7 | 291 | TCGTCTGAGCTGACTCAGGACCCTGCTGTGTCTGTGGCCTTG |
| | (nucleotide | GGACAGACAGTCAGGATCACATGCCAAGGAGACAGCCTCA |
| | sequence light | GAAGTTATTATGCAAGCTGGTACCAGCAGAAGCCAGGACAG |
| | chain) | GCCCCTGTACTTGTCATCTATGGTAAAAACAACCGGCCCTC |
| | | AGGGATCCCAGACCGATTCTCTGGCTCCAGCTCAGGAAACA |
| | | CAGCTTCCTTGACCATCACTGGGGCTCAGGCGGAAGATGAG |
| | | GCTGACTATTACTGTAACTCCCTTGATAGGCGCGGTATGTGG |
| | | GTATTCGGCGGAGGGACCAAGCTGACCGTCCTAGGTCAACC |
| | | CAAGGCTGCCCCCAGCGTGACCCTGTTCCCCCCCAGCAGCG |
| | | AGGAACTGCAGGCCAACAAGGCCACCCTGGTCTGCCTGATC |
| | | AGCGACTTCTACCCAGGCGCCGTGACCGTGGCCTGGAAGGC |
| | | CGACAGCAGCCCCGTGAAGGCCGGCGTGGAGACCACCACC |
| | | CCCAGCAAGCAGAGCAACAACAAGTACGCCGCCAGCAGCT |
| | | ACCTGAGCCTGACCCCCGAGCAGTGGAAGAGCCACAGGTCC |
| | | TACAGCTGCCAGGTGACCCACGAGGGCAGCACCGTGGAGA |
| | | AAACCGTGGCCCCCACCGAGTGCAGC |
| | 292 | GAGGTGCAATTGTTGGAGTCTGGGGGAGGCTTGGTACAGCC |
| | (nucleotide | TGGGGGGTCCCTGAGACTCTCCTGTGCAGCCTCCGGATTCA |
| | sequence heavy | CCTTTAGCAGTTATGCCATGAGCTGGGTCCGCCAGGCTCCA |
| | chain) | GGGAAGGGGCTGGAGTGGGTCTCAGCTATTAGTGGTAGTGG |
| | | TGGTAGCACATACTACGCAGACTCCGTGAAGGGCCGGTTCA |
| | | CCATCTCCAGAGACAATTCCAAGAACACGCTGTATCTGCAG |
| | | ATGAACAGCCTGAGAGCCGAGGACACGGCCGTATATTACTG |
| | | TGCGCGTGACGACCCGTGGCCGCCGTTCGACTACTGGGGCC |
| | | AAGGAACCCTGGTCACCGTCTCGAGTGCTAGCACCAAGGGC |
| | | CCATCGGTCTTCCCCCTGGCACCCTCCTCCAAGAGCACCTCT |
| | | GGGGGCACAGCGGCCCTGGGCTGCCTGGTCAAGGACTACTT |
| | | CCCCGAACCGGTGACGGTGTCGTGGAACTCAGGCGCCCTGA |
| | | CCAGCGGCGTGCACACCTTCCCGGCTGTCCTACAGTCCTCA |
| | | GGACTCTACTCCCTCAGCAGCGTGGTGACCGTGCCCTCCAG |
| | | CAGCTTGGGCACCCAGACCTACATCTGCAACGTGAATCACA |
| | | AGCCCAGCAACACCAAGGTGGACAAGAAAGTTGAGCCCAA |
| | | ATCTTGTGACAAAACTCACACATGCCCACCGTGCCCAGCAC |
| | | CTGAAGCTGCAGGGGGACCGTCAGTCTTCCTCTTCCCCCCA |
| | | AAACCCAAGGACACCCTCATGATCTCCCGGACCCCTGAGGT |
| | | CACATGCGTGGTGGTGGACGTGAGCCACGAAGACCCTGAGG |
| | | TCAAGTTCAACTGGTACGTGGACGGCGTGGAGGTGCATAAT |
| | | GCCAAGACAAAGCCGCGGGAGGAGCAGTACAACAGCACGT |
| | | ACCGTGTGGTCAGCGTCCTCACCGTCCTGCACCAGGACTGG |
| | | CTGAATGGCAAGGAGTACAAGTGCAAGGTCTCCAACAAAG |
| | | CCCTCGGCGCCCCCATCGAGAAAACCATCTCCAAAGCCAAA |
| | | GGGCAGCCCCGAGAACCACAGGTGTACACCCTGCCCCCATC |
| | | CCGGGATGAGCTGACCAAGAACCAGGTCAGCCTGACCTGCC |
| | | TGGTCAAAGGCTTCTATCCCAGCGACATCGCCGTGGAGTGG |
| | | GAGAGCAATGGGCAGCCGGAGAACAACTACAAGACCACGC |
| | | CTCCCGTGCTGGACTCCGACGGCTCCTTCTTCCTCTACAGCA |
| | | AGCTCACCGTGGACAAGAGCAGGTGGCAGCAGGGGAACGT |
| | | CTTCTCATGCTCCGTGATGCATGAGGCTCTGCACAACCACTA |
| | | CACGCAGAAGAGCCTCTCCCTGTCTCCGGGTAAA |
| | 293 | SSELTQDPAVSVALGQTVRITCQGDSLRSYYASWYQQKPGQA |
| | (Light chain) | PVLVIYGKNNRPSGIPDRFSGSSSGNTASLTITGAQAEDEADYY |
| | | CNSLDRRGMWVFGGGTKLTVLGQPKAAPSVTLFPPSSEELQA |
| | | NKATLVCLISDFYPGAVTVAWKADSSPVKAGVETTTPSKQSN |
| | | NKYAASSYLSLTPEQWKSHRSYSCQVTHEGSTVEKTVAPTECS |
| | 294 | EVQLLESGGGLVQPGGSLRLSCAASGFTFSSYAMSWVRQAPG |
| | (Heavy chain) | KGLEWVSAISGSGGSTYYADSVKGRFTISRDNSKNTLYLQMNS |
| | | LRAEDTAVYYCARDDPWPPFDYWGQGTLVTVSSASTKGPSVF |
| | | PLAPSSKSTSGGTAALGCLVKDYFPEPVTVSWNSGALTSGVHT |
| | | FPAVLQSSGLYSLSSWTVPSSSLGTQTYICNVNHKPSNTKVDK |
| | | KVEPKSCDKTHTCPPCPAPEAAGGPSVFLFPPKPKDTLMISRTP |
| | | EVTCVVVDVSHEDPEVKFNWYVDGVEVHNAKTKPREEQYNS |
| | | TYRVVSVLTVLHQDWLNGKEYKCKVSNKALGAPIEKTISKAK |
| | | GQPREPQVYTLPPSRDELTKNQVSLTCLVKGFYPSDIAVEWES |
| | | NGQPENNYKTTPPVLDSDGSFFLYSKLTVDKSRWQQGNVFSCS |
| | | VMHEALHNHYTQKSLSLSPGK |
| 11D5 | 295 | GACATCCAGATGACCCAGTCTCCTTCCACCCTGTCTGCATCT |
| | (nucleotide | GTAGGAGACCGTGTCACCATCACTTGCCGTGCCAGTCAGAG |
| | sequence light | TATTAGTAGCTGGTTGGCCTGGTATCAGCAGAAACCAGGGA |
| | chain) | AAGCCCCTAAGCTCCTGATCTATGATGCCTCCAGTTTGGAA |
| | | AGTGGGGTCCCATCACGTTTCAGCGGCAGTGGATCCGGGAC |
| | | AGAATTCACTCTCACCATCAGCAGCTTGCAGCCTGATGATTT |
| | | TGCAACTTATTACTGCCAACAGCTTAATTCGTATCCTCAGAC |
| | | GTTTGGCCAGGGCACCAAAGTCGAGATCAAGCGTACGGTGG |
| | | CTGCACCATCTGTCTTCATCTTCCCGCCATCTGATGAGCAGT |
| | | TGAAATCTGGAACTGCCTCTGTTGTGTGCCTGCTGAATAACT |
| | | TCTATCCCAGAGAGGCCAAAGTACAGTGGAAGGTGGATAAC |
| | | GCCCTCCAATCGGGTAACTCCCAGGAGAGTGTCACAGAGCA |
| | | GGACAGCAAGGACAGCACCTACAGCCTCAGCAGCACCCTG |
| | | ACGCTGAGCAAAGCAGACTACGAGAAACACAAAGTCTACG |
| | | CCTGCGAAGTCACCCATCAGGGCCTGAGCTCGCCCGTCACA |
| | | AAGAGCTTCAACAGGGGAGAGTGT |
| | 296 | CAGGTGCAATTGGTGCAGTCTGGGGCTGAGGTGAAGAAGCC |
| | (nucleotide | TGGGTCCTCGGTGAAGGTCTCCTGCAAGGCCTCCGGAGGCA |
| | sequence heavy | CATTCAGCAGCTACGCTATAAGCTGGGTGCGACAGGCCCCT |
| | chain) | GGACAAGGGCTCGAGTGGATGGGAGGGATCATCCCTATCTT |
| | | TGGTACAGCAAACTACGCACAGAAGTTCCAGGGCAGGGTCA |
| | | CCATTACTGCAGACAAATCCACGAGCACAGCCTACATGGAG |
| | | CTGAGCAGCCTGAGATCTGAGGACACCGCCGTGTATTACTG |
| | | TGCGAGATCTACTCTGATCTACGGTTACTTCGACTACTGGGG |
| | | CCAAGGGACCACCGTGACCGTCTCCTCAGCTAGCACCAAGG |
| | | GCCCATCGGTCTTCCCCCTGGCACCCTCCTCCAAGAGCACCT |
| | | CTGGGGGCACAGCGGCCCTGGGCTGCCTGGTCAAGGACTAC |
| | | TTCCCCGAACCGGTGACGGTGTCGTGGAACTCAGGCGCCCT |
| | | GACCAGCGGCGTGCACACCTTCCCGGCTGTCCTACAGTCCT |
| | | CAGGACTCTACTCCCTCAGCAGCGTGGTGACCGTGCCCTCC |
| | | AGCAGCTTGGGCACCCAGACCTACATCTGCAACGTGAATCA |
| | | CAAGCCCAGCAACACCAAGGTGGACAAGAAAGTTGAGCCC |
| | | AAATCTTGTGACAAAACTCACACATGCCCACCGTGCCCAGC |
| | | ACCTGAAGCTGCAGGGGGACCGTCAGTCTTCCTCTTCCCCCC |
| | | AAAACCCAAGGACACCCTCATGATCTCCCGGACCCCTGAGG |
| | | TCACATGCGTGGTGGTGGACGTGAGCCACGAAGACCCTGAG |
| | | GTCAAGTTCAACTGGTACGTGGACGGCGTGGAGGTGCATAA |
| | | TGCCAAGACAAAGCCGCGGGAGGAGCAGTACAACAGCACG |
| | | TACCGTGTGGTCAGCGTCCTCACCGTCCTGCACCAGGACTG |
| | | GCTGAATGGCAAGGAGTACAAGTGCAAGGTCTCCAACAAA |
| | | GCCCTCGGCGCCCCCATCGAGAAAACCATCTCCAAAGCCAA |
| | | AGGGCAGCCCCGAGAACCACAGGTGTACACCCTGCCCCCAT |
| | | CCCGGGATGAGCTGACCAAGAACCAGGTCAGCCTGACCTGC |
| | | CTGGTCAAAGGCTTCTATCCCAGCGACATCGCCGTGGAGTG |
| | | GGAGAGCAATGGGCAGCCGGAGAACAACTACAAGACCACG |
| | | CCTCCCGTGCTGGACTCCGACGGCTCCTTCTTCCTCTACAGC |
| | | AAGCTCACCGTGGACAAGAGCAGGTGGCAGCAGGGGAACG |
| | | TCTTCTCATGCTCCGTGATGCATGAGGCTCTGCACAACCACT |
| | | ACACGCAGAAGAGCCTCTCCCTGTCTCCGGGTAAA |
| | 297 | DIQMTQSPSTLSASVGDRVTITCRASQSISSWLAWYQQKPGKA |
| | (Light chain) | PKLLIYDASSLESGVPSRFSGSGSGTEFTLTISSLQPDDFATYYC |
| | | QQLNSYPQTFGQGTKVEIKRTVAAPSVFIFPPSDEQLKSGTASV |
| | | VCLLNNFYPREAKVQWKVDNALQSGNSQESVTEQDSKDSTYS |
| | | LSSTLTLSKADYEKHKVYACEVTHQGLSSPVTKSFNRGEC |
| | 298 | QVQLVQSGAEVKKPGSSVKVSCKASGGTFSSYAISWVRQAPG |
| | (Heavy chain) | QGLEWMGGIIPIFGTANYAQKFQGRVTITADKSTSTAYMELSS |
| | | LRSEDTAVYYCARSTLIYGYFDYWGQGTTVTVSSASTKGPSVF |
| | | PLAPSSKSTSGGTAALGCLVKDYFPEPVTVSWNSGALTSGVHT |
| | | FPAVLQSSGLYSLSSWTVPSSSLGTQTYICNVNHKPSNTKVDK |
| | | KVEPKSCDKTHTCPPCPAPEAAGGPSVFLFPPKPKDTLMISRTP |
| | | EVTCVVVDVSHEDPEVKFNWYVDGVEVHNAKTKPREEQYNS |
| | | TYRVVSVLTVLHQDWLNGKEYKCKVSNKALGAPIEKTISKAK |
| | | GQPREPQVYTLPPSRDELTKNQVSLTCLVKGFYPSDIAVEWES |
| | | NGQPENNYKTTPPVLDSDGSFFLYSKLTVDKSRWQQGNVFSCS |
| | | VMHEALHNHYTQKSLSLSPGK |
| 9B11 | 299 | GACATCCAGATGACCCAGTCTCCTTCCACCCTGTCTGCATCT |
| | (nucleotide | GTAGGAGACCGTGTCACCATCACTTGCCGTGCCAGTCAGAG |
| | sequence light | TATTAGTAGCTGGTTGGCCTGGTATCAGCAGAAACCAGGGA |
| | chain) | AAGCCCCTAAGCTCCTGATCTATGATGCCTCCAGTTTGGAA |
| | | AGTGGGGTCCCATCACGTTTCAGCGGCAGTGGATCCGGGAC |
| | | AGAATTCACTCTCACCATCAGCAGCTTGCAGCCTGATGATTT |
| | | TGCAACTTATTACTGCCAACAGGTTAATTCTTATCCGCAGAC |
| | | GTTTGGCCAGGGCACCAAAGTCGAGATCAAGCGTACGGTGG |
| | | CTGCACCATCTGTCTTCATCTTCCCGCCATCTGATGAGCAGT |
| | | TGAAATCTGGAACTGCCTCTGTTGTGTGCCTGCTGAATAACT |
| | | TCTATCCCAGAGAGGCCAAAGTACAGTGGAAGGTGGATAAC |
| | | GCCCTCCAATCGGGTAACTCCCAGGAGAGTGTCACAGAGCA |
| | | GGACAGCAAGGACAGCACCTACAGCCTCAGCAGCACCCTG |
| | | ACGCTGAGCAAAGCAGACTACGAGAAACACAAAGTCTACG |
| | | CCTGCGAAGTCACCCATCAGGGCCTGAGCTCGCCCGTCACA |
| | | AAGAGCTTCAACAGGGGAGAGTGT |
| | 300 | CAGGTGCAATTGGTGCAGTCTGGGGCTGAGGTGAAGAAGCC |
| | (nucleotide | TGGGTCCTCGGTGAAGGTCTCCTGCAAGGCCTCCGGAGGCA |
| | sequence heavy | CATTCAGCAGCTACGCTATAAGCTGGGTGCGACAGGCCCCT |
| | chain) | GGACAAGGGCTCGAGTGGATGGGAGGGATCATCCCTATCTT |
| | | TGGTACAGCAAACTACGCACAGAAGTTCCAGGGCAGGGTCA |
| | | CCATTACTGCAGACAAATCCACGAGCACAGCCTACATGGAG |
| | | CTGAGCAGCCTGAGATCTGAGGACACCGCCGTGTATTACTG |
| | | TGCGAGATCTTCTGGTGCTTACCCGGGTTACTTCGACTACTG |
| | | GGGCCAAGGGACCACCGTGACCGTCTCCTCAGCTAGCACCA |
| | | AGGGCCCATCGGTCTTCCCCCTGGCACCCTCCTCCAAGAGC |
| | | ACCTCTGGGGGCACAGCGGCCCTGGGCTGCCTGGTCAAGGA |
| | | CTACTTCCCCGAACCGGTGACGGTGTCGTGGAACTCAGGCG |
| | | CCCTGACCAGCGGCGTGCACACCTTCCCGGCTGTCCTACAG |
| | | TCCTCAGGACTCTACTCCCTCAGCAGCGTGGTGACCGTGCCC |
| | | TCCAGCAGCTTGGGCACCCAGACCTACATCTGCAACGTGAA |
| | | TCACAAGCCCAGCAACACCAAGGTGGACAAGAAAGTTGAG |
| | | CCCAAATCTTGTGACAAAACTCACACATGCCCACCGTGCCC |
| | | AGCACCTGAAGCTGCAGGGGGACCGTCAGTCTTCCTCTTCC |
| | | CCCCAAAACCCAAGGACACCCTCATGATCTCCCGGACCCCT |
| | | GAGGTCACATGCGTGGTGGTGGACGTGAGCCACGAAGACCC |
| | | TGAGGTCAAGTTCAACTGGTACGTGGACGGCGTGGAGGTGC |
| | | ATAATGCCAAGACAAAGCCGCGGGAGGAGCAGTACAACAG |
| | | CACGTACCGTGTGGTCAGCGTCCTCACCGTCCTGCACCAGG |
| | | ACTGGCTGAATGGCAAGGAGTACAAGTGCAAGGTCTCCAAC |
| | | AAAGCCCTCGGCGCCCCCATCGAGAAAACCATCTCCAAAGC |
| | | CAAAGGGCAGCCCCGAGAACCACAGGTGTACACCCTGCCCC |
| | | CATCCCGGGATGAGCTGACCAAGAACCAGGTCAGCCTGACC |
| | | TGCCTGGTCAAAGGCTTCTATCCCAGCGACATCGCCGTGGA |
| | | GTGGGAGAGCAATGGGCAGCCGGAGAACAACTACAAGACC |
| | | ACGCCTCCCGTGCTGGACTCCGACGGCTCCTTCTTCCTCTAC |
| | | AGCAAGCTCACCGTGGACAAGAGCAGGTGGCAGCAGGGGA |
| | | ACGTCTTCTCATGCTCCGTGATGCATGAGGCTCTGCACAACC |
| | | ACTACACGCAGAAGAGCCTCTCCCTGTCTCCGGGTAAA |
| | 301 | DIQMTQSPSTLSASVGDRVTITCRASQSISSWLAWYQQKPGKA |
| | (Light chain) | PKLLIYDASSLESGVPSRFSGSGSGTEFTLTISSLQPDDFATYYC |
| | | QQVNSYPQTFGQGTKVEIKRTVAAPSVFIFPPSDEQLKSGTASV |
| | | VCLLNNFYPREAKVQWKVDNALQSGNSQESVTEQDSKDSTYS |
| | | LSSTLTLSKADYEKHKVYACEVTHQGLSSPVTKSFNRGEC |
| | 302 | QVQLVQSGAEVKKPGSSVKVSCKASGGTFSSYAISWVRQAPG |
| | (Heavy chain) | QGLEWMGGIIPIFGTANYAQKFQGRVTITADKSTSTAYMELSS |
| | | LRSEDTAVYYCARSSGAYPGYFDYWGQGTTVTVSSASTKGPS |
| | | VFPLAPSSKSTSGGTAALGCLVKDYFPEPVTVSWNSGALTSGV |
| | | HTFPAVLQSSGLYSLSSVVTVPSSSLGTQTYICNVNHKPSNTKV |
| | | DKKVEPKSCDKTHTCPPCPAPEAAGGPSVFLFPPKPKDTLMISR |
| | | TPEVTCVVVDVSHEDPEVKFNWYVDGVEVHNAKTKPREEQY |
| | | NSTYRVVSVLTVLHQDWLNGKEYKCKVSNKALGAPIEKTISK |
| | | AKGQPREPQVYTLPPSRDELTKNQVSLTCLVKGFYPSDIAVEW |
| | | ESNGQPENNYKTTPPVLDSDGSFFLYSKLTVDKSRWQQGNVFS |
| | | CSVMHEALHNHYTQKSLSLSPGK |
| 20G2 | 303 | GACATCCAGATGACCCAGTCTCCATCCACCCTGTCTGCATCT |
| | (nucleotide | GTAGGAGACCGTGTCACCATCACTTGCCGTGCCAGTCAGAG |
| | sequence light | TATTAGTAGCTGGTTGGCCTGGTATCAGCAGAAACCAGGGA |
| | chain) | AAGCCCCTAAGCTCCTGATCTATGATGCCTCCAGTTTGGAA |
| | | AGTGGGGTCCCATCACGTTTCAGCGGCAGTGGATCCGGGAC |
| | | AGAATTCACTCTCACCATCAGCAGCTTGCAGCCTGATGATTT |
| | | TGCAACTTATTACTGCCAACAGCAGCACTCGTATTATACGTT |
| | | TGGCCAGGGCACCAAAGTCGAGATCAAGCGTACGGTGGCTG |
| | | CACCATCTGTCTTCATCTTCCCGCCATCTGATGAGCAGTTGA |
| | | AATCTGGAACTGCCTCTGTTGTGTGCCTGCTGAATAACTTCT |
| | | ATCCCAGAGAGGCCAAAGTACAGTGGAAGGTGGATAACGC |
| | | CCTCCAATCGGGTAACTCCCAGGAGAGTGTCACAGAGCAGG |
| | | ACAGCAAGGACAGCACCTACAGCCTCAGCAGCACCCTGACG |
| | | CTGAGCAAAGCAGACTACGAGAAACACAAAGTCTACGCCT |
| | | GCGAAGTCACCCATCAGGGCCTGAGCTCGCCCGTCACAAAG |
| | | AGCTTCAACAGGGGAGAGTGT |
| | 304 | CAGGTGCAATTGGTGCAGTCTGGGGCTGAGGTGAAGAAGCC |
| | (nucleotide | TGGGTCCTCGGTGAAGGTCTCCTGCAAGGCCTCCGGAGGCA |
| | sequence heavy | CATTCAGCAGCTACGCTATAAGCTGGGTGCGACAGGCCCCT |
| | chain) | GGACAAGGGCTCGAGTGGATGGGAGGGATCATCCCTATCTT |
| | | TGGTACAGCAAACTACGCACAGAAGTTCCAGGGCAGGGTCA |
| | | CCATTACTGCAGACAAATCCACGAGCACAGCCTACATGGAG |
| | | CTGAGCAGCCTGAGATCTGAGGACACCGCCGTGTATTACTG |
| | | TGCGAGATCTTACTACTGGGAATCTTACCCGTTCGACTACTG |
| | | GGGCCAAGGGACCACCGTGACCGTCTCCAGCGCTAGCACCA |
| | | AGGGCCCATCGGTCTTCCCCCTGGCACCCTCCTCCAAGAGC |
| | | ACCTCTGGGGGCACAGCGGCCCTGGGCTGCCTGGTCAAGGA |
| | | CTACTTCCCCGAACCGGTGACGGTGTCGTGGAACTCAGGCG |
| | | CCCTGACCAGCGGCGTGCACACCTTCCCGGCTGTCCTACAG |
| | | TCCTCAGGACTCTACTCCCTCAGCAGCGTGGTGACCGTGCCC |
| | | TCCAGCAGCTTGGGCACCCAGACCTACATCTGCAACGTGAA |
| | | TCACAAGCCCAGCAACACCAAGGTGGACAAGAAAGTTGAG |
| | | CCCAAATCTTGTGACAAAACTCACACATGCCCACCGTGCCC |
| | | AGCACCTGAAGCTGCAGGGGGACCGTCAGTCTTCCTCTTCC |
| | | CCCCAAAACCCAAGGACACCCTCATGATCTCCCGGACCCCT |
| | | GAGGTCACATGCGTGGTGGTGGACGTGAGCCACGAAGACCC |
| | | TGAGGTCAAGTTCAACTGGTACGTGGACGGCGTGGAGGTGC |
| | | ATAATGCCAAGACAAAGCCGCGGGAGGAGCAGTACAACAG |
| | | CACGTACCGTGTGGTCAGCGTCCTCACCGTCCTGCACCAGG |
| | | ACTGGCTGAATGGCAAGGAGTACAAGTGCAAGGTCTCCAAC |
| | | AAAGCCCTCGGCGCCCCCATCGAGAAAACCATCTCCAAAGC |
| | | CAAAGGGCAGCCCCGAGAACCACAGGTGTACACCCTGCCCC |
| | | CATCCCGGGATGAGCTGACCAAGAACCAGGTCAGCCTGACC |
| | | TGCCTGGTCAAAGGCTTCTATCCCAGCGACATCGCCGTGGA |
| | | GTGGGAGAGCAATGGGCAGCCGGAGAACAACTACAAGACC |
| | | ACGCCTCCCGTGCTGGACTCCGACGGCTCCTTCTTCCTCTAC |
| | | AGCAAGCTCACCGTGGACAAGAGCAGGTGGCAGCAGGGGA |
| | | ACGTCTTCTCATGCTCCGTGATGCATGAGGCTCTGCACAACC |
| | | ACTACACGCAGAAGAGCCTCTCCCTGTCTCCGGGTAAA |
| | 305 | DIQMTQSPSTLSASVGDRVTITCRASQSISSWLAWYQQKPGKA |
| | (Light chain) | PKLLIYDASSLESGVPSRFSGSGSGTEFTLTISSLQPDDFATYYC |
| | | QQQHSYYTFGQGTKVEIKRTVAAPSVFIFPPSDEQLKSGTASVV |
| | | CLLNNFYPREAKVQWKVDNALQSGNSQESVTEQDSKDSTYSL |
| | | SSTLTLSKADYEKHKVYACEVTHQGLSSPVTKSFNRGEC |
| | 306 | QVQLVQSGAEVKKPGSSVKVSCKASGGTFSSYAISWVRQAPG |
| | (Heavy chain) | QGLEWMGGIIPIFGTANYAQKFQGRVTITADKSTSTAYMELSS |
| | | LRSEDTAVYYCARSYYWESYPFDYWGQGTTVTVSSASTKGPS |
| | | VFPLAPSSKSTSGGTAALGCLVKDYFPEPVTVSWNSGALTSGV |
| | | HTFPAVLQSSGLYSLSSVVTVPSSSLGTQTYICNVNHKPSNTKV |
| | | DKKVEPKSCDKTHTCPPCPAPEAAGGPSVFLFPPKPKDTLMISR |
| | | TPEVTCVVVDVSHEDPEVKFNWYVDGVEVHNAKTKPREEQY |
| | | NSTYRVVSVLTVLHQDWLNGKEYKCKVSNKALGAPIEKTISK |
| | | AKGQPREPQVYTLPPSRDELTKNQVSLTCLVKGFYPSDIAVEW |
| | | ESNGQPENNYKTTPPVLDSDGSFFLYSKLTVDKSRWQQGNVFS |
| | | CSVMHEALHNHYTQKSLSLSPGK |

[0844] The anti-4-BB antibodies were produced by co-transfecting HEK293-EBNA cells with the mammalian expression vectors using polyethylenimine. The cells were transfected with the corresponding expression vectors in a 1:1 ratio (“vector heavy chain”:“vector light chain”).

[0845] For production in 500 mL shake flasks, 400 million HEK293 EBNA cells were seeded 24 hours before transfection. For transfection cells were centrifuged for 5 minutes at 210×g, and the supernatant was replaced by pre-warmed CD CHO medium. Expression vectors (200 μg of total DNA) were mixed in 20 mL CD CHO medium. After addition of 540 μL PEI, the solution was vortexed for 15 seconds and incubated for 10 minutes at room temperature. Afterwards, cells were mixed with the DNA/PEI solution, transferred to a 500 mL shake flask and incubated for 3 hours at 37° C. in an incubator with a 5% CO2 atmosphere. After the incubation, 160 mL of F17 medium was added and cells were cultured for 24 hours. One day after transfection 1 mM valproic acid and 7% Feed with supplements were added. After culturing for 7 days, the supernatant was collected by centrifugation for 15 minutes at 210×g. The solution was sterile filtered (0.22 μm filter), supplemented with sodium azide to a final concentration of 0.01% (w/v), and kept at 4° C.

[0846] Purification of antibody molecules from cell culture supernatants was carried out by affinity chromatography using Protein A as described above for purification of antigen Fc fusions.

[0847] The protein was concentrated and filtered prior to loading on a HiLoad Superdex 200 column (GE Healthcare) equilibrated with 20 mM Histidine, 140 mM NaCl solution of pH 6.0.

[0848] The protein concentration of purified antibodies was determined by measuring the OD at 280 nm, using the molar extinction coefficient calculated on the basis of the amino acid sequence. Purity and molecular weight of the antibodies were analyzed by CE-SDS in the presence and absence of a reducing agent (Invitrogen, USA) using a LabChipGXII (Caliper). The aggregate content of antibody samples was analyzed using a TSKgel G3000 SW XL analytical size-exclusion column (Tosoh) equilibrated in a 25 mM K₂HPO₄, 125 mM NaCl, 200 mM L-Arginine Monohydrocloride, 0.02% (w/v) NaN₃, pH 6.7 running buffer at 25° C.

[0849] Table 49 summarizes the yield and final content of the anti-4-BB P329G LALA IgG1 antibodies.

TABLE 49
Biochemical analysis of anti-4-BB P329G LALA IgG1 clones

| | Yield | Monomer | CE-SDS (non | |
|---|---|---|---|---|
| Clone | [mg/l] | [%] | red) | CE-SDS (red) |
| 12B3 | 4 | 98 | 98.6% | 22.5% (29 kDa) |
| P329GLALA | | | (173 kDa) | 75.5% (64 kDa) |
| IgG1 | | | | |
| 25G7 | 25 | 100 | 99.7% | 76.8% (65 kDa) |
| P329GLALA | | | (181.6 kDa) | 23% (42 kDa) |
| IgG1 | | | | |
| 11D5 | 9.7 | 98.7 | 99.6% | tbd. |
| P329GLALA | | | (176 kDa) | |
| IgG1 | | | | |
| 9B11 | 22 | 100 | 100% | 2% (127 kDa) |
| P329GLALA | | | (153 kDa) | 72.3% (114 kDa) |
| IgG1 | | | | 24.6% (37.1 kDa) |
| 20G2 | 11 | 100 | 98.5% | 80.2% (62.8 kDa) |
| P329GLALA | | | (166 kDa) | 18% (28.4 kDa) |
| IgG1 | | | | |

### Example 7

### Characterization of Anti-4-BB Antibodies

### 7.1 Binding on Human 4-1BB

### 7.1.1 Surface Plasmon Resonance (Avidity+Affinity)

[0850] Binding of phage-derived 4-1BB-specific antibodies to the recombinant 4-1BB Fc(kih) was assessed by surface plasmon resonance (SPR). All SPR experiments were performed on a Biacore T200 at 25° C. with HBS-EP as running buffer (0.01 M HEPES pH 7.4, 0.15 M NaCl, 3 mM EDTA, 0.005% Surfactant P20, Biacore, Freiburg/Germany).

[0851] In the same experiment, the species selectivity and the avidity of the interaction between the phage display derived anti-4-1BB clones 12B3, 25G7, 11D5, 9B11 and 20G2 (all human IgG1 P329GLALA), and recombinant 4-1BB (human, cyno and murine) was determined. Biotinylated human, cynomolgus and murine 4-1BB Fc(kih) were directly coupled to different flow cells of a streptavidin (SA) sensor chip. Immobilization levels up to 100 resonance units (RU) were used. Phage display derived anti-4-1BB human IgG1 P329GLALA antibodies were passed at a concentration range from 4 to 450 nM (3-fold dilution) with a flow of 30 μL/minute through the flow cells over 120 seconds. Complex dissociation was monitored for 220 seconds. Bulk refractive index differences were corrected for by subtracting the response obtained in a reference flow cell, where no protein was immobilized.

[0852] Kinetic constants were derived using the Biacore T200 Evaluation Software (vAA, Biacore AB, Uppsala/Sweden), to fit rate equations for 1:1 Langmuir binding by numerical integration and used to estimate qualitatively the avidity (Table 50).

[0853] In the same experiment, the affinities of the interaction between phage display derived antibodies (human IgG1 P329GLALA) to recombinant 4-1BB (human, cyno and murine) were determined. Anti-human Fab antibody (Biacore, Freiburg/Germany) was directly coupled on a CMS chip at pH 5.0 using the standard amine coupling kit (Biacore, Freiburg/Germany). The immobilization level was approximately 7500 RU. Phage display derived antibodies to 4-1BB were captured for 60 seconds at concentrations ranging from 25 nM. Recombinant human 4-1BB Fc(kih) was passed at a concentration range from 4.1 to 1000 nM with a flow of 30 μL/minutes through the flow cells over 120 seconds. The dissociation was monitored for 120 seconds. Bulk refractive index differences were corrected for by subtracting the response obtained on reference flow cell. Here, the antigens were flown over a surface with immobilized anti-human Fab antibody but on which HBS-EP has been injected rather than the antibodies. Kinetic constants were derived using the Biacore T200 Evaluation Software (vAA, Biacore AB, Uppsala/Sweden), to fit rate equations for 1:1 Langmuir binding by numerical integration.

[0854] Clones 25G7 and 9B11 bind human 4-1BB Fc(kih) with a lower affinity than clones 12B3 and 11D5. Clone 20G2 is not binding to human 4-1BB. Affinity constants for the interaction between anti-4-1BB P329GLALA IgG1 and human 4-1BB Fc(kih) were determined by fitting to a 1:1 Langmuir binding.

TABLE 50
Binding of anti-4-1BB antibodies to recombinant human 4-1BB

| | | | Recombinant human 4-1BB | | |
|---|---|---|---|---|---|
| | | Recombinant | (affinity format) | | |
| | | human 4-1BB | ka | | KD |
| Clone | Origin | (avidity format) | (1/Ms) | kd (1/s) | (M) |
| 12B3 | Phage | ++++ | 3.4E+ 04 | 1.0E−03 | 3.0E−08 |
| | display | | | | |
| 25G7 | Phage | + | 2.9E+ 04 | 9.9E−04 | 3.4E−08 |
| | display | | | | |
| 11D5 | Phage | +++ | 3.2E+04 | 1.2E−03 | 3.6E−08 |
| | display | | | | |
| 9B11 | Phage | ++ | 2.7E+04 | 3.9E−03 | 1.4E−07 |
| | display | | | | |

### 7.1.2 Binding to Human 4-1BB Expressing Cells: Resting and Activated Human Peripheral Mononuclear Blood Leukocytes (PBMC)

[0855] Expression of human 4-1BB is absent on resting and naïve human T cells (Kienzle G. and von Kempis J (2000), Int. Immunol. 12(1), 73-82, Wen T. et al. (2002), J. Immunol. 168, 4897-4906). After activation with immobilized anti-human CD3 agonistic antibody, 4-1BB is upregulated on CD4⁺ and CD8⁺ T cells. 4-1BB expression has also been reported on activated human NK cells (Baessler T. et. al. (2010) Blood 115(15), 3058-3069), activated human NKT cells (Cole S. L. et al. (2014) J. Immunol. 192(8), 3898-3907), activated human B cells (Zhang et al. (2010) J. Immunol. 184(2), 787-795), activated human eosinophils (Heinisch et al. 2001), constitutively on human neutrophils (Heinisch I. V. (2000) J Allergy Clin Immunol. 108(1), 21-28), activated human monocytes (Langstein J. et al. (1998) J Immunol. 160(5), 2488-2494, Kwajah M. and Schwarz H. (2010) Eur J Immunol. 40(7), 1938-1949), constitutively on human regulatory T cells (Bacher P. et al. (2014) Mucosal Immunol. 7(4), 916-928), human follicular dendritic cells (Pauly S. et al. (2002) J Leukoc Biol. 72(1), 35-42), activated human dendritic cells (Zhang L. et al. (2004) Cell Mol Immunol. 1(1), 71-76) and on blood vessels of malignant human tumors (Broll K. et al. (2001) Am J Clin Pathol. 115(4), 543-549).

[0856] To test binding of our anti-4-1BB clones to naturally cell-expressed human 4-1BB, fresh isolated resting peripheral blood mononuclear cells (PBMCs) or PHA-L/Proleukin pre-activated and CD3/CD28-reactivated PBMC were used. PBMCs from buffy coats obtained from the Zurich blood donation center were isolated by ficoll density centrifugation using Histopaque 1077 (SIGMA Life Science, Cat.-No. 10771, polysucrose and sodium diatrizoate, adjusted to a density of 1.077 g/mL) and resuspended in T cell medium consisting of RPMI 1640 medium (Gibco by Life Technology, Cat.-No. 42401-042) supplied with 10% Fetal Bovine Serum (FBS, Gibco by Life Technology, Cat.-No. 16000-044, Lot 941273, gamma-irradiated, mycoplasma-free and heat inactivated at 56° C. for 35 min), 1% (v/v) GlutaMAX-I (GIBCO by Life Technologies, Cat.-No. 35050 038), 1 mM Sodium Pyruvate (SIGMA, Cat.-No. S8636), 1% (v/v) MEM non-essential amino acids (SIGMA, Cat.-No. M7145) and 50 μM β-Mercaptoethanol (SIGMA, M3148). PBMCs were used directly after isolation (resting cells) or stimulated to induce 4-1BB expression at the cell surface of T cells by culturing for 3 to 5 days in T cell medium supplemented with 200 U/mL Proleukin (Novartis Pharma Schweiz AG, CHCLB-P-476-700-10340) and 2 μg/mL PHA-L (SIGMA Cat.-No. L2769) in a 6-well tissue culture plate and then 2 day in a 6-well tissue culture plate coated with 10 μg/mL anti-human CD3 (clone OKT3, BioLegend, Cat.-No. 317315) and 2 μg/mL anti-human CD28 (clone CD28.2, BioLegend, Cat.-No.: 302928) in T cell medium at 37° C. and 5% CO₂.

[0857] To determine binding to human 4-1BB expressed by human PBMCs, 0.1-0.2×10⁶ freshly isolated or activated PBMCs were added to each well of a round-bottom suspension cell 96-well plates (Greiner bio-one, cellstar, Cat.-No. 650185). Plates were centrifuged 4 minutes with 400×g at 4° C. and supernatant was discarded. Cells were washed with 200 μL/well DPBS and then incubated for 30 min at 4° C. with 100 μL/mL DPBS containing 1:5000 diluted Fixable Viability Dye eFluor 450 (eBioscience, Cat.-No. 64-0863-18) or Fixable Viability Dye eFluor 660 (eBioscience, Cat.-No. 65-0864-18). Afterwards cells were washed once with 200 μL/well cold FACS buffer (DPBS supplied with 2% (v/v) FBS, 5 mM EDTA pH8 (Amresco, Cat. No. E177) and 7.5 mM sodium azide (Sigma-Aldrich S2002)). Next, 50 μL/well of 4° C. cold FACS buffer containing titrated anti-human 4-1BB binders were added and cells were incubated for 120 minutes at 4° C. Cells were washed four times with 200 μL/well 4° C. FACS buffer to remove onbound molecules. Afterwards cells were further incubated with 50 μL/well of 4° C. cold FACS buffer containing 2.5 μg/mL PE-conjugated AffiniPure anti-human IgG Fcγ-fragment-specific goat F(ab′)2 fragment (Jackson ImmunoResearch, Cat.-No. 109-116-098) or 30 μg/mL FITC-conjugated AffiniPure anti-human IgG Fcγ-fragment-specific goat F(ab′)2 fragment (Jackson ImmunoResearch, Cat.-No. 109 096 098), anti-human CD45 AF488 (clone HI30, BioLegend, Cat.-No. 304019), 0.67 μg/mL APC/Cy7-conjugated anti-human CD3 moIgG1κ (clone UCH1, BioLegend, Cat.-No. 300426) or 0.125 μg/mL PE-conjugated anti-human CD3 mouse IgG1K (clone SK7, BioLegend Cat.-No. 344806) or 0.67 μg/mL PerCP/Cy5.5-conjugated anti-human CD3 mouse IgG1 κ (clone UCHT1, BioLegend, Cat.-No. 300430), 0.125 μg/mL BV421-conjugated anti-human CD4 moIgG1K (clone RPA-T4, BioLegend, Cat.-No. 300532) or 0.23 μg/mL BV421-conjugated anti-human CD4 mouse IgG2b κ (clone OKT4, BioLegend, Cat.-No. 317434) or 0.08 μg/mL PE/Cy7-conjugated anti-human CD4 mouse IgG1κ (clone SK3, BioLegend Cat.-No. 344612), 0.17 μg/mL APC/Cy7-conjugated anti-human CD8 (mouse IgG1κ, clone RPA-T8, BioLegend Cat.-No. 301016) or 0.125 μg/mL PE/Cy7-conjugated anti-human CD8a (moIgG1K, clone RPA-T8, BioLegend, Cat.-No. 301012) or 0.33 μg/mL anti-human CD8 BV510 (moIgG1K, clone SK1, BioLegend, Cat.-No. 344732) and 0.25 μg/mL APC-conjugated anti-human CD56 (mouse IgG1κ, clone HCD56, BioLegend, Cat.-No. 318310) or 1 μL AF488-conjugated anti-human CD56 (moIgG1K, clone B159, BD Pharmingen, Cat.-No. 557699) and 0.67 μg/mL anti-human CD19-PE/Cy7 (moIgG1κ, clone HIB19, BioLegend, Cat.-No. 302216) and incubated for 30 minutes at 4° C.

[0858] Cells were washed twice with 200 μL FACS buffer/well and fixated by resuspending in 50 μL/well DPBS containing 1% Formaldehyde (Sigma, HT501320-9.5L). Cells were acquired the same or next day using a 3-laser Canto II (BD Bioscience with DIVA software) or a 5-laser Fortessa (BD Bioscience with DIVA software) or 3-laser MACSQuant Analyzer 10 (Miltenyi Biotech). Gates were set on CD8⁺ and CD4⁺ T cells and the median fluorescence intensity (MFI) or geo mean of fluorescence intensity of the secondary detection antibody was used to analyze binding of primary antibodies. Using Graph Pad Prism (Graph Pad Software Inc.) data was baselined by subtracting the blank values (no primary antibody added) and the EC50 values were calculated using non-linear regression curve fit (robust fit).

[0859] Human T cells lack 4-1BB expression in a resting status but upregulate 4-1BB after activation. Human CD8⁺ T cells show a stronger up-regulation than CD4⁺ T. The generated anti-human 4-1BB-specific antibodies can bind to human 4-1BB expressed by activated human T cells as shown in FIGS. 34A, 34B, 34C, and 34D. The shown anti-human 4-1BB clones can be classified in strong binding (clones 12B3 and 11D5) and low binders (clones 25G7 and 9B11). Differences are not only seen by EC₅₀ value but also by MFI. The EC₅₀ values of binding to activated CD8⁺ T cells are shown in Table 51. The anti-mouse 4-1BB-specific clone 20G2 did not bind to human 4-1BB and is therefore not human-cross-reactive.

TABLE 51
EC₅₀ values of binding to activated human CD8 T cells

| Clone | EC₅₀ [nM] |
|---|---|
| 25G7 | 29 |
| 12B3 | 0.95 |
| 11D5 | 1.46 |
| 9B11 | 4.485 |
| 20G2 | n.d. |

### 7.2 Binding on Murine 4-1BB

### 7.2.1 Surface Plasmon Resonance (Avidity+Affinity)

[0860] Binding of the phage-derived 4-1BB specific antibody 20G2 to recombinant murine 4-1BB Fc(kih) was assessed by surface plasmon resonance as described above for human 4-1BB Fc(kih) (see Example 7.1.1). Kinetic constants were derived using the Biacore T200 Evaluation Software (vAA, Biacore AB, Uppsala/Sweden), to fit rate equations for 1:1 Langmuir binding by numerical integration and used to estimate qualitatively the avidity (Table 52).

[0861] For affinity determination, due to an unspecific interaction of the Fc fusion protein to the reference flow cell, murine 4-1BB Fc(kih) was cleaved with AcTEV protease and the Fc portion removed by chromatographical method. Anti-human Fc antibody (Biacore, Freiburg/Germany) was directly coupled on a CM5 chip at pH 5.0 using the standard amine coupling kit (Biacore, Freiburg/Germany). The immobilization level was about 7500 RU. Phage display derived antibodies to 4-1BB were captured for 60 seconds at concentrations ranging from 25 nM. Recombinant murine 4-1BB AcTEV was passed at a concentration range from 4.1 to 1000 nM with a flow of 30 μL/minutes through the flow cells over 120 seconds. The dissociation was monitored for 120 seconds. Bulk refractive index differences were corrected for by subtracting the response obtained on reference flow cell. Here, the antigens were flown over a surface with immobilized anti-human Fc antibody but on which HBS-EP has been injected rather than the antibodies.

[0862] Kinetic constants were derived using the Biacore T200 Evaluation Software (vAA, Biacore AB, Uppsala/Sweden), to fit rate equations for 1:1 Langmuir binding by numerical integration. It was shown that clone 20G2 binds murine 4-1BB (Table 52).

[0863] Affinity constants of interaction between anti-4-1BB P329GLALA IgG1 molecules and murine 4-1BB were derived using the Biacore T200 Evaluation Software (vAA, Biacore AB, Uppsala/Sweden), to fit rate equations for 1:1 Langmuir binding by numerical integration.

TABLE 52
Binding of anti-4-1BB antibody 20G2 to murine 4-1BB

| | | | Recombinant murine 4-1BB | | |
|---|---|---|---|---|---|
| | | Recombinant | (affinity format) | | |
| | | murine 4-1BB | ka | | KD |
| Clone | Origin | (avidity format) | (1/Ms) | kd (1/s) | (M) |
| 20G2 | Phage | +++++ | 2.4E+04 | 3.4E−04 | 1.4E−08 |
| | display | | | | |

### 7.2.2 Binding to Mouse 4-1BB Expressing Cells: Resting and Activated Mouse Splenocytes (Selected Clones)

[0864] Similar to human, freshly isolated resting mouse T cells do not express 4-1BB but expression can be induced by TCR activation via peptide-pulsed APCs (Cannons J. et al. (2001) J. Immunol. 167(3): 1313-1324) or immobilized anti-mouse CD3 or a combination of anti-mouse CD3 and anti-mouse CD28 antibodies (Pollok K. et al. (1995), European J. Immunol. 25(2), 488-494). After activation via surface immobilized anti-CD3 antibody 4-1BB expression is reported to be higher on CD8⁺ T cells (Shuford W, et al. (1997) J. of Experimental Med. 186(1), 47-55), but this may depend on activation protocol. Further 4-1BB expression has also been reported on activated mouse NK cells (Melero et al. (1998) Cell Immunol. 190(2), 167-172), activated mouse NKT cells (Vinay D, et al. (2004) J Immunol. 173(6), 4218-4229), activated mouse B cells (Vinay, Kwon (2011) Cell Mol Immunol. 8(4), 281-284), constitutively on mouse neutrophils (Lee S. et al. (2005) Infect Immun. 73(8), 5144-5151) and mouse regulatory T cells (Gavin et al. (2002) Nat Immunol. 3(1), 33-41), mouse IgE-stimulated mast cell (Nishimoto et al. (2005) Blood 106(13): 4241-4248), mouse myeloid-lineage cells (Lee et al. (2008) Nat Immunol. 9(8), 917-926), mouse follicular dendritic cells (Middendorp et al. (2009) Blood 114(11), 2280-2289) and activated mouse dendritic cells (Wilcox, Chapoval et al. (2002) J Immunol. 168(9), 4262-4267).

[0865] Anti-4-1BB specific antibody binding was tested directly after isolation of splenocytes from healthy female C57BL/6 mice as well as after in vitro activation for 72 hours with surface immobilized agonistic anti-mouse CD3 and anti-mouse CD28 antibodies. Female C57BL/6 mice (age 7-9 weeks) were purchased at Charles River, France. After arrival animals were maintained for one week to get accustomed to new environment and for observation. Mice were maintained under specific-pathogen-free condition with food and water ad libitum and daily cycles of 12 h light/12 h darkness according to committed guidelines (GV-Solas; Felasa; TierschG). Continuous health monitoring was carried out on a regular basis. Mice were sacrificed by cervical dislocation. Spleens were dissected and stored on ice in RPMI 1640 supplemented with 10% (v/v) heat-inactivated FBS and 1% (v/v) GlutaMAX-I. To obtain a single cell solution spleens were homogenized through a 70 μm cell strainer (BD Falcon; Germany) and subjected to erythrolysis for 10 minutes at 37° C. in ACK lysis buffer (0.15M NH4CL, 10 mM KHCO3, 0.1 mM EDTA in ddH₂O, pH 7.2). After two washing steps with sterile DPBS splenocytes were reconstituted in T cell medium. Either cells were used freshly (resting) or 10⁶ cells/mL splenocytes were further stimulated for 72 hours in T cell medium consisting of RPMI 1640 medium supplied with 10% FBS, 1% (v/v) GlutaMAX-I, 1 mM Sodium Pyruvate, 1% (v/v) MEM non-essential amino acids and 50 μM β-Mercaptoethanol on 6-well cell culture plates coated with 1 μg/mL anti-mouse CD3 antibody (rat IgG2b, clone 17A2, BioLegend, Cat.-No. 100223) and 2 μg/mL anti-mouse CD28 antibody (syrian hamster, clone 37.51, BioLegend Cat.-No. 102112).

[0866] To test binding to mouse 4-1BB, freshly isolated or activated mouse splenocytes were resuspended in DPBS and 0.1×10⁶/well splenocytes were transferred to a round-bottom 96-suspension cell plate (Greiner bio-one, cellstar, Cat.-No. 650185). Cells were centrifuged 4 minutes at 4° C. and 400×g and supernatant was removed. After resuspension in 100μ/well DPBS containing 1:5000 diluted Fixable Viability Dye eFluor 450 (eBioscience, Cat.-No. 65-0863-18) or Fixable Viability Dye eFluor 660 (eBioscience, Cat.-No. 65-0864-18) cells were incubated for 30 min at 4° C. Cells were washed with FACS buffer and 50 μL/well FACS buffer containing titrated concentrations of anti-human 4-1BB huIgG1 P329G LALA antibody-clones 12B3, 25G7, 11D5, 9B11 and anti-mouse 4-1BB-specific clone 20G2 as huIgG1 P329G LALA or mouse IgG1 or mouse IgG1 DAPG. After 1 h incubation at 4° C. cells were washed four times to remove excessive antibodies. If binding of anti-mouse 20G2 as mouse IgG1 and mouse IgG1 DAPG format was tested, cells were incubated in 50 μL FACS buffer/well containing 30 μg/mL FITC-conjugated anti-mouse IgG Fcγ-fragment-specific AffiniPure goat F(ab′)γ fragment for 30 min at 4° C. and washed twice with FACS-buffer. If binding of anti-4-1BB binders containing a human IgG1 P329G LALA Fc-fragment were tested this step was skipped. Afterwards cells were incubated in 50 μL FACS buffer/well containing 0.67 μg/mL PE-conjugated anti-mouse CD3 (rat IgG2bK, clone 17A2, BD Pharmingen, Cat.-No. 555275) or APC-Cy7-conjugated anti-mouse CD3 (rat IgG2aK, clone 53-6.7, BioLegend, Cat.-No. 100708), 0.67 μg/mL PE/Cy7-conjugated anti-mouse CD4 (rat IgG2bK, clone GK1.5, BioLegend, Cat.-No. 100422), 0.67 μg/mL APC/Cy7-conjugated anti-mouse CD8 (rat IgG2aK, clone 53-6.7, BioLegend, Cat.-No. 1007141) or PE-conjugated anti-mouse CD8 (rat IgG2aK, clone 53-6.7, BioLegend, Cat.-No. 100708), 2 μg/mL APC-conjugated anti-mouse NK1.1 (mouse IgG2a, κ, clone PK136, BioLegend, Cat.-No. 108710) or PerCP/Cy5.5-conjugated anti-mouse NK1.1 (mouse IgG2a, κ, clone PK136, BioLegend, Cat.-No. 108728) and 10 μg/mL anti-mouse CD16/CD32 (mouse Fc-Block, rat IgG2b κ, clone 2.4G2, BD Bioscience, Cat.-No. 553142). If binding of anti-4-1BB binders containing a human IgG1 P329G LALA Fc-fragment were tested 30 μg/mL FITC-conjugated AffiniPure anti-human IgG Fcγ-fragment-specific goat F(ab′)2 fragment (Jackson ImmunoResearch, Cat. No. 109 096 098) were also added. Cells were incubated for 30 min at 4° C., washed twice with 200 μL/well FACS-buffer and resuspended for fixation with 50 μL/well DPBS containing 1% (v/v) formaldehyde. The next day cells were resuspended in 200 μL/well FACS buffer and acquired using the 2-laser CantoII (BD Bioscience with DIVA software) or 5-laser Fortessa (BD Bioscience with DIVA software). Gates were set on CD8⁺ and CD4⁺ T cells and the median fluorescence intensity (MFI) of the secondary detection antibody was used to analyze binding of primary antibodies. Using Graph Pad Prism (Graph Pad Software Inc.) data was baselined by subtracting the blank values (no primary antibody added) and the EC₅₀ values were calculated using non-linear regression curve fit (robust fit).

[0867] As shown in FIGS. 35B and 35D, only the anti-mouse 4-1BB binding clone 20G2 bound to activated mouse CD8⁺ and CD4⁺ T cells, whereas the anti-human-4-1BB binding clones 9B11, 11D5, 12B3 and 25G7 did not bind to mouse-4-1BB and are therefore not mouse-cross-reactive. Only clone 20G2 from the tested clones can be used as a mouse surrogate. As expected none of the anti-4-1BB binding clones showed binding to freshly isolated resting mouse T cells (FIGS. 35A and 35C). Similar to the activated human CD4⁺ T cells also the activated mouse CD4⁺ T cells express less 4-1BB than the activated mouse CD8⁺ T cells. The difference however is not as strong as for human T cells, this may also be related to the different activation protocol. EC₅₀ values are shown in Table 53.

TABLE 53
EC₅₀ values of binding to activated murine CD8 and CD4 T cells

| Clone | EC₅₀ CD8 [nM] | EC₅₀ CD4 [nM] |
|---|---|---|
| 25G7 | n.d. | n.d. |
| 12B3 | n.d. | n.d. |
| 11D5 | n.d | n.d |
| 9B11 | n.d | n.d |
| 20G2 | 16.36 | 10.10 |

[0868] As shown in FIGS. 36B and 36D, the anti-mouse-4-1BB binding clone 20G2 binds to activated mouse CD8⁺ and CD4⁺ T cells as moIgG1 wildtype (wt) or moIgG1 DAPG format in a similar way. The binding is similar to the binding shown in FIGS. 35B and 35D; therefore changing of format does not influence the binding properties. We transferred the clone 20G2 to moIgG to prevent triggering of anti-drug-antibodies (ADAs) in immune competent mice. The DAPG mutation is equivalent to the P329G LALA mutation in the human IgG1 constructs, e.g. it prevents crosslinking via the FcR⁺ immune cells. EC50 values are shown in Table 54.

TABLE 54
EC₅₀ values of binding to activated murine CD8 and CD4 T cells

| Clone | EC₅₀ CD8 [nM] | EC₅₀ CD4 [nM] |
|---|---|---|
| 20G2 mu IgG1 κ DAPG | 17.91 | 11.22 |
| 20G2 mu IgG1 κ wt | 18.51 | 9.917 |

### 7.3 Binding on Cynomolgus 4-1BB

[0869] 7.3.1 Surface plasmon resonance (avidity+affinity)

[0870] Binding of phage-derived 4-1BB specific antibodies 12B3, 25G7, 11D5 and 9B11 to the recombinant cynomolgus 4-1BB Fc(kih) was assessed by surface plasmon resonance (SPR) as described above for human 4-1BB Fc(kih) (see Example 7.1.1). All SPR experiments were performed on a Biacore T200 at 25° C. with HBS-EP as running buffer (0.01 M HEPES pH 7.4, 0.15 M NaCl, 3 mM EDTA, 0.005% Surfactant P20, Biacore, Freiburg/Germany). Kinetic constants were derived using the Biacore T200 Evaluation Software (vAA, Biacore AB, Uppsala/Sweden), to fit rate equations for 1:1 Langmuir binding by numerical integration and used to estimate qualitatively the avidity (Table 55).

[0871] In the same experiment, the affinities of the interaction between phage display derived antibodies (human IgG1 P329GLALA) to recombinant cynomolgus 4-1BB Fc(kih) were determined. Anti-human Fab antibody (Biacore, Freiburg/Germany) was directly coupled on a CM5 chip at pH 5.0 using the standard amine coupling kit (Biacore, Freiburg/Germany). The immobilization level was approximately 9000 RU. Phage display derived antibodies to 4-1BB were captured using concentrations of 25 to 100 nM. The experiment was performed as described for human 4-1BB Fc(kih (Example 7.1.1).

[0872] Clones 12B3, 25G7, 11D5 and 9B11 bound cynomolgus 4-1BB Fc(kih) with similar affinities (Table 55), but 12B3 and 11D5 bound with higher avidity to cells expressing cynomolgus 4-1BB. Affinity constants of interaction between anti-4-1BB P329GLALA IgG1 and cynomolgus 4-1BB Fc(kih) were derived using the Biacore T100 Evaluation Software (vAA, Biacore AB, Uppsala/Sweden), to fit rate equations for 1:1 Langmuir binding by numerical integration.

TABLE 55
Binding of anti-4-1BB antibodies to
recombinant cynomolgus 4-1BB Fc(kih)

| | | | Recombinant cynomolgus 4-1BB | | |
|---|---|---|---|---|---|
| | | Recombinant | (affinity format) | | |
| | | cynomolgus 4-1BB | ka | | KD |
| Clone | Origin | (avidity format) | (1/Ms) | kd (1/s) | (M) |
| 12B3 | Phage | +++ | 3.8E+04 | 7.8E−04 | 2.0E−08 |
| | display | | | | |
| 25G7 | Phage | ++ | 2.7E+04 | 4.6E−04 | 1.7E−08 |
| | display | | | | |
| 11D5 | Phage | +++ | 3.1E+04 | 7.7E−04 | 2.4E−08 |
| | display | | | | |
| 9B11 | Phage | + | 2.6E+04 | 2.0E−03 | 7.8E−08 |
| | display | | | | |

### 7.3.2 Binding on Cynomolgus 4-1BB Expressing Cells: Activated Cynomolgus Peripheral Mononuclear Blood Leukocytes (PBMC)

[0873] To test the cross-reactivity of the anti-human 4-1BB binding clones to cynomolgus cells, PBMCs of healthy cynomolgus fascicularis were isolated from heparinized blood using density gradient centrifugation as described for human PBMCs (7.1.2) with minor differences. Isolated PBMC were cultured for 72 hours at a cell density of 1.5*10⁶ cells/mL in T cell medium consisting of RPMI 1640 medium supplied with 10% FBS, 1% (v/v) GlutaMAX-I, 1 mM Sodium Pyruvate, 1% (v/v) MEM non-essential amino acids and 50 μM β-Mercaptoethanol on 6-well cell culture plates (Greiner Bio-One, Germany) coated with 10 μg/mL anti-cyno-cross-reactive CD3 (mo IgG3λ, anti-human CD3, clone SP34, BD Pharmingen, Cat.-No. 556610) and 2 μg/mL anti-cyno-cross-reactive CD28 (moIgG1K, anti-human CD28, clone CD28.2, BioLegend, Cat.-No. 140786) antibodies. After 72 h stimulation cells were harvested and seeded to a round-bottom suspension cell 96-well plate (Greiner bio-one, cellstar, Cat.-No. 650185) at a concentration of 0.1×10⁶ cells/well. Cells were incubated in 50 μL/well FACS buffer containing different concentrations of the primary anti-human 4-1BB-specific huIgG P32G LALA antibodies for 2 h at 4° C. Afterwards cells were washed four times with 200 μL/well FACS buffer and incubated further for 30 min at 4° C. with 50 μL/well FACS buffer containing 2 μL PE-conjugated anti-cyno-crossreactive CD4 (moIgG2aκ, anti-human CD4, clone M-T477, BD Pharmingen, Cat.-No. 556616), 1 μg/mL PerCP/Cy5.5-conjugated anti-cyno-cross-reactive CD8 (moIgG1K, anti-human CD8, clone RPA-T8, BioLegend, Cat.-No. 301032) and 30 μg/mL FITC-conjugated AffiniPure anti-human IgG Fcγ-fragment-specific goat F(ab′)2 fragment (Jackson ImmunoResearch, Cat. No. 109 096 098). Cells were washed twice with FACS buffer and resuspended in 100 μL/well FACS buffer supplied with 0.2 μg/mL DAPI to discriminated dead from living cells. Cells were immediately acquired using a 5-laser Fortessa (BD Bioscience with DIVA software). Gates were set on CD8⁺ and CD4⁺ T cells and the median fluorescence intensity (MFI) of the secondary detection antibody was used to analyze binding of primary antibodies. Using Graph Pad Prism (Graph Pad Software Inc.) data was baselined by subtracting the blank values (no primary antibody added) and the EC₅₀ values were calculated using non-linear regression curve fit (robust fit).

[0874] As shown in FIGS. 37A and 37B, at least three of the anti-human 4-1BB clones, namely 12B3, 11D5 and 25G7 are also cross-reactive for cynomolgus 4-1BB expressed on activated CD4⁺ and CD8⁺ T cells. Interestingly the binding curves look similar to human 4-1BB, e.g. 12B3 and 11D5 show the highest MFI and lowest EC₅₀ values of all tested constructs, whereas 25G7 is a weaker binder with lower MFI and higher EC₅₀ value (Table 56). The clone 9B11 is only binding at the highest concentration of 100 nM. This is contrary to binding to human 4-1BB where clone 9B11 is superior compared to clone 25G7. Further differences of 4-1BB expression levels on activated cynomolgus CD4⁺ and CD8⁺ T cells are similar to activated human T cells e.g. CD4⁺ T cells express much less 4-1BB than CD8⁺ T cells.

TABLE 56
EC₅₀ values of binding to activated cynomolgus CD8 and CD4 T cells

| Clone | EC₅₀ CD8 [nM] | EC₅₀ CD4 [nM] |
|---|---|---|
| 25G7 | 4.52 | 6.68 |
| 12B3 | 0.47 | 0.59 |
| 11D5 | 1.04 | 0.97 |
| 9B11 | n.d. | n.d. |

### 7.4 Ligand Blocking Property

[0875] To determine the capacity of 4-1BB-specific human IgG1 P329GLALA antibody molecules to interfere with 4-1BB/4-1BB-ligand interactions human 4-1BB ligand (R&D systems) was used. Similarly, murine 4-1BB ligand (R&D systems) was used to assess the ligand blocking property of the anti-murine 4-1BB specific IgG1 P329GLALA antibody 20G2.

[0876] Human or murine 4-1BB ligand was directly coupled to two flow cells of a CM5 chip at approximately 1500 RU by pH 5.0 using the standard amine coupling kit (Biacore, Freiburg/Germany). Recombinant human, or murine, 4-1BB Fc(kih) was passed on the second flow cell at a concentration of 500 nM with a flow of 30 μL/minute over 90 seconds. The dissociation was omitted and the phage derived anti-4-1BB human IgG1 P329GLALA was passed on both flow cells at a concentration of 200 nM with a flow of 30 uL/minute over 90 seconds. The dissociation was monitored for 60 seconds. Bulk refractive index differences were corrected for by subtracting the response obtained on reference flow cell. Here, the antibodies were flown over a surface with immobilized human, or murine, 4-1BB ligand but on which HBS-EP has been injected instead of recombinant human 4-1BB Fc(kih).

[0877] The phage-derived clone 25G7 bound to the complex of human 4-1BB with its 4-1BB ligand (Table 57, FIG. 38A). Thus, this antibody does not compete with the ligand for binding to human 4-1BB and is therefore termed “non-ligand blocking”. On the contrary, clones 12B3, 11D5 and 9B11 did not bind to human 4-1BB associated with its ligand and are therefore termed “ligand blocking”. The murine surrogate 20G2 did not bind to murine 4-1BB associated with its ligand and is also termed “ligand blocking”

TABLE 57
Ligand binding property of the anti-4-1BB
clones determined by surface plasmon resonance

| | | | Second injection | |
|---|---|---|---|---|
| | | | (anti-4-1BB | |
| Clone | Origin | First injection | clone) | Ligand blocking |
| 12B3 | Phage | human 4-1BB | Not binding | YES |
| | display | Fc(kih) | | |
| 25G7 | Phage | human 4-1BB | Binding | NO |
| | display | Fc(kih) | | |
| 11D5 | Phage | human 4-1BB | Not binding | YES |
| | display | Fc(kih) | | |
| 9B11 | Phage | human 4-1BB | Not binding | YES |
| | display | Fc(kih) | | |
| 20G2 | Phage | murine 4-1BB | Not binding | YES |
| | display | Fc(kih) | | |

### Example 8

### Functional Properties of Anti 4-1BB Binding Clones

[0878] 4-1BB serves as a co-stimulatory receptor and improves expansion, cytokine production and functional properties of T cells in a TCR-dependent manner. TCR-activation via surface immobilized anti-CD3 antibody or peptide-pulsed antigen presenting cells induces up-regulation of 4-1BB on T cells (Pollok et al. (1993) J. Immunol. 150(3): 771-781) and support after engagement the immune response by boosting expansion and cytokine release (Hurtado et al. (1995) J Immunology 155(7), 3360-3367). To test boosting capacity of the generated anti-human 4-1BB antibodies, round-bottom suspension 96-well plates (Greiner bio-one, cellstar, Cat.-No. 650185) were coated over night with DPBS containing 2 μg/mL AffiniPure F(ab)2 fragment goat anti-human IgG, Fcγ-fragment-specific (Jackson Immunoresearch, Cat.-No. 109-006-008) and 2 μg/mL AffiniPure goat anti-mouse IgG, Fcγ-fragment-specific (Jackson Immunoresearch, Cat.-No 115-005-008). Plates were washed with DPBS to remove excessive molecules and were blocked for 90 min at 37° C. with DPBS containing 1% (w/v) BSA (SIGMA-Aldrich, Cat-No. A3059-100G). Supernatant was removed and plates were incubated with DPBS supplied with 1% (w/v) BSA and with or without 10 ng/mL anti-human CD3 antibody (BioLegend, Cat.-No. 317315, clone OKT3) for 90 min at 37° C. Plates were washed with DPBS and incubated with DPBS supplied with 1% (w/v) BSA and different concentrations of titrated anti-human 4-1BB IgG1 P329 G LALA antibodies. Plates were washed with DPBS and supernatant was aspirated.

[0879] Human PBMCs were isolated as described before (7.1.2) and activated in RPMI 1640 containing 10% (v/v) FBS, 1% (v/v) GlutaMAX-I, 2 ug/mL PHA-L and 200 U/mL Proleukin for 5 days. Cells were further cultured in RPMI 1640 containing 10% (v/v) FBS, 1% (v/v) GlutaMAX-I and 200 U/mL Proleukin for further 21 days at a density of 1-2×10⁶ cells/mL. Long time cultured PBMCs were harvested washed and CD8 T cells were isolated according to manufactures protocol using human CD8⁺ T cell isolation kit (Miltenyi Biotec, Cat.-No. 130-096-495). Preactivated and sorted CD8⁺ T cells were seeded to 7×10⁴ cells/well in 200 μL/well T cell medium consisting of RPMI 1640 medium supplied with 10% FBS, 1% (v/v) GlutaMAX-I, 1 mM Sodium Pyruvate, 1% (v/v) MEM non-essential amino acids and 50 μM β-Mercaptoethanol. Cells were incubated for 72 h, the last 4 h in the presence of Golgi-Stop (BD Bioscience, Cat.-No. 554724). Cells were washed with DPBS and incubated for 30 min at 4° C. in 100 μL/well DPBS containing 1:5000 diluted LIVE/DEAD Fixable Green Dead Cell Stain (Molecular Probes, Life Technologies, Cat.-No. L-23101). Afterwards cells were washed and incubated for 30 min at 4° C. in 50 μL/well FACS buffer containing 0.5 μg/mL PerCP/Cy5.5-conjugated anti-human CD8 (mouse IgG1 κ, clone RPA-T8, BioLegend, Cat.-No. 301032), 0.5 μg/mL PE/Cy7-conjugated anti-human CD25 (mouse IgG1 κ, clone BC96, BioLegend, Cat.-No. 302612) and 1 μg/mL APC/Cy7-conjugated anti-human PD-1 (mouse IgG1 κ, clone EH12.2H7, BioLegend, Cat.-No. 329922). Cells were washed with FACS buffer and resuspended in 50 μL/well in freshly prepared fixation/permeabilization solution (eBioscience, Cat.-No. 00-5523-00). After incubation for 30 min at 4° C., cells were washed with freshly prepared permeabilization buffer (eBioscience, Cat.-No. 00-5523-00) and incubated for 1 h at 4° C. with 50 μL/well Perm-buffer containing 2 μg/mL APC-labeled anti-human-IFNγ (mo IgG1 κ, clone B27, BD Pharmingen, Cat.-No. 554702) and 2 μg/mL PE-conjugated anti-human-TNFα (mo IgG1 κ, clone MAb11, BD Pharmingen, Cat.-No. 554513). Cells were washed and fixed with DPBS containing 1% formaldehyde. Cells were acquired the next day using 2-laser Canto II (BD, DIVA software). Gates were set on CD8⁺ T cells and frequency of TNFα and IFNγ secreting CD8⁺ T cells were determined. Using Graph Pad Prism (Graph Pad Software Inc.) data was blotted and curves were calculated using non-linear regression curve fit (robust fit).

[0880] As described before in the absence of TCR- or CD3-stimulation 4-1BB engagement has no effect on CD8⁺ T cell function (Pollok 1995), whereas in the presence of suboptimal CD3-activation co-stimulation of 4-1BB increase cytokine secretion (FIG. 39A or 39C). Sub-optimal activation via CD3-antibody induces IFNγ-secretion in 30% of CD8⁺ T cells in the total CD8⁺ T cell population. Addition of 4-1BB-co-stimulation increases the IFNγ+CD8 T cell population up to 55% in a concentration dependent manner (FIG. 39B). Table 58 shows the corresponding EC₅₀ values. TNFα secretion could be increased from 23% to 39% of total CD8+ T cell population (FIG. 39D). Similar to their binding properties clones 12B3 and 11D5 increase INFγ expression superior to 25G7 and 9B11 in frequency and EC₅₀. Therefore our generated clones are functional and can improve TCR-mediated T cell activation and function. If the anti-4-1BB-specific antibodies were not surface immobilized, they did not improve CD8⁺ T cell activation (not shown).

TABLE 58
EC₅₀ values of increase of IFNγ secretion in activated CD8⁺ T cells

| Clone | EC₅₀ CD8 [nM] |
|---|---|
| 25G7 | 0.12 |
| 12B3 | 0.07 |
| 11D5 | 0.06 |
| 9B11 | 0.12 |

### Example 9

### Preparation, Purification and Characterization of Bispecific Bivalent Antibodies Targeting 4-1BB and a Tumor Associated Antigen (TAA)

### 9.1 Generation of Bispecific Bivalent Antibodies Targeting 4-1BB and Fibroblast Activation Protein (FAP) (2+2 Format, Comparative Examples)

[0881] Bispecific agonistic 4-1BB antibodies with bivalent binding for 4-1BB and for FAP were prepared. The crossmab technology was applied to reduce the formation of wrongly paired light chains as described in International patent application No. WO 2010/145792 A1.

[0882] The generation and preparation of the FAP binders is described in WO 2012/020006 A2, which is incorporated herein by reference.

[0883] In this example, a crossed Fab unit (VHCL) of the FAP binder 28H1 was C-terminally fused to the heavy chain of an anti-4-1BB hu IgG1 using a (G4S)₄ connector sequence. This heavy chain fusion was co-expressed with the light chain of the anti-4-1BB and the corresponding FAP crossed light chain (VLCH1). The Pro329Gly, Leu234Ala and Leu235Ala mutations have been introduced in the constant region of the heavy chains to abrogate binding to Fc gamma receptors according to the method described in International Patent Appl. Publ. No. WO 2012/130831 A1. The resulting bispecific, bivalent construct is analogous to the one depicted in FIG. 40A.

[0884] Table 59 shows, respectively, the nucleotide and amino acid sequences of mature bispecific, bivalent anti-4-1BB/anti-FAP human IgG1 P329GLALA antibodies.

TABLE 59
Sequences of bispecific, bivalent anti-4-1BB/anti-FAP human
IgG1 P329GLALA antigen binding molecules

| SEQ ID | | |
|---|---|---|
| NO: | Description | Sequence |
| 307 | (12B3) VHCH1- | CAGGTGCAATTGGTGCAGTCTGGGGCTGAGGTGAAGA |
| | Heavy chain- | AGCCTGGGTCCTCGGTGAAGGTCTCCTGCAAGGCCTCC |
| | (28H1) VHCL | GGAGGCACATTCAGCAGCTACGCTATAAGCTGGGTGCG |
| | (nucleotide | ACAGGCCCCTGGACAAGGGCTCGAGTGGATGGGAGGG |
| | sequence) | ATCATCCCTATCTTTGGTACAGCAAACTACGCACAGAA |
| | | GTTCCAGGGCAGGGTCACCATTACTGCAGACAAATCCA |
| | | CGAGCACAGCCTACATGGAGCTGAGCAGCCTGAGATCT |
| | | GAGGACACCGCCGTGTATTACTGTGCGAGATCTGAATT |
| | | CCGTTTCTACGCTGACTTCGACTACTGGGGCCAAGGGA |
| | | CCACCGTGACCGTCTCCTCAGCTAGCACCAAGGGCCCA |
| | | TCCGTGTTCCCTCTGGCCCCTTCCAGCAAGTCTACCTCT |
| | | GGCGGCACAGCCGCTCTGGGCTGCCTCGTGAAGGACTA |
| | | CTTCCCCGAGCCTGTGACAGTGTCCTGGAACTCTGGCG |
| | | CCCTGACATCCGGCGTGCACACCTTTCCAGCTGTGCTG |
| | | CAGTCCTCCGGCCTGTACTCCCTGTCCTCCGTCGTGACA |
| | | GTGCCCTCCAGCTCTCTGGGCACCCAGACCTACATCTG |
| | | CAACGTGAACCACAAGCCCTCCAACACCAAGGTGGAC |
| | | AAGAAGGTGGAACCCAAGTCCTGCGACAAGACCCACA |
| | | CCTGTCCCCCTTGTCCTGCCCCTGAAGCTGCTGGCGGCC |
| | | CTAGCGTGTTCCTGTTCCCCCCAAAGCCCAAGGACACC |
| | | CTGATGATCTCCCGGACCCCCGAAGTGACCTGCGTGGT |
| | | GGTGGATGTGTCCCACGAGGACCCTGAAGTGAAGTTCA |
| | | ATTGGTACGTGGACGGCGTGGAAGTGCACAATGCCAA |
| | | GACCAAGCCTAGAGAGGAACAGTACAACTCCACCTAC |
| | | CGGGTGGTGTCCGTGCTGACCGTGCTGCACCAGGATTG |
| | | GCTGAACGGCAAAGAGTACAAGTGCAAGGTGTCCAAC |
| | | AAGGCCCTGGGAGCCCCCATCGAAAAGACCATCTCCA |
| | | AGGCCAAGGGCCAGCCTCGCGAGCCTCAGGTGTACAC |
| | | CCTGCCCCCTAGCAGAGATGAGCTGACCAAGAACCAG |
| | | GTGTCCCTGACCTGTCTCGTGAAAGGCTTCTACCCCTCC |
| | | GATATCGCCGTGGAATGGGAGAGCAACGGCCAGCCCG |
| | | AGAACAACTACAAGACCACCCCCCCTGTGCTGGACTCC |
| | | GACGGCTCATTCTTCCTGTACTCTAAGCTGACAGTGGA |
| | | CAAGTCCCGGTGGCAGCAGGGCAACGTGTTCTCCTGCT |
| | | CCGTGATGCACGAGGCCCTGCACAACCACTACACCCAG |
| | | AAGTCCCTGTCCCTGTCTCCCGGGGGAGGCGGAGGATC |
| | | TGGCGGAGGCGGATCCGGTGGTGGCGGATCTGGGGGC |
| | | GGTGGATCTGAGGTGCAGCTGCTGGAATCTGGGGGAG |
| | | GACTGGTGCAGCCAGGCGGATCTCTGAGGCTGTCCTGC |
| | | GCTGCTTCCGGCTTTACCTTCTCCAGCCACGCCATGAGT |
| | | TGGGTGCGCCAGGCACCCGGAAAAGGACTGGAATGGG |
| | | TGTCAGCCATCTGGGCCTCCGGCGAGCAGTACTACGCC |
| | | GATAGCGTGAAGGGCCGGTTCACCATCTCTCGGGATAA |
| | | CAGCAAGAATACTCTGTACCTGCAGATGAACTCCCTGC |
| | | GCGCTGAAGATACCGCTGTGTATTACTGCGCCAAGGGC |
| | | TGGCTGGGCAACTTCGATTACTGGGGCCAGGGAACCCT |
| | | CGTGACTGTCTCGAGCGCTTCTGTGGCCGCTCCCTCCGT |
| | | GTTCATCTTCCCACCTTCCGACGAGCAGCTGAAGTCCG |
| | | GCACTGCCTCTGTCGTGTGCCTGCTGAACAACTTCTACC |
| | | CTCGGGAAGCCAAGGTGCAGTGGAAAGTGGATAACGC |
| | | CCTGCAGTCCGGCAACTCCCAGGAATCCGTGACCGAGC |
| | | AGGACTCCAAGGACAGCACCTACTCCCTGAGCAGCACC |
| | | CTGACCCTGTCCAAGGCCGACTACGAGAAGCACAAGG |
| | | TGTACGCCTGTGAAGTGACCCACCAGGGCCTGTCCAGC |
| | | CCCGTGACCAAGTCCTTCAACCGGGGCGAGTGC |
| 287 | VLCL-Light chain | see Table 48 |
| | 1 (12B3) | |
| | (nucleotide | |
| | sequence) | |
| 184 | VLCH1-Light | GAGATCGTGCTGACCCAGTCTCCCGGCACCCTGAGCCT |
| | chain 2 (28H1) | GAGCCCTGGCGAGAGAGCCACCCTGAGCTGCAGAGCC |
| | (nucleotide | AGCCAGAGCGTGAGCCGGAGCTACCTGGCCTGGTATCA |
| | sequence) | GCAGAAGCCCGGCCAGGCCCCCAGACTGCTGATCATCG |
| | | GCGCCAGCACCCGGGCCACCGGCATCCCCGATAGATTC |
| | | AGCGGCAGCGGCTCCGGCACCGACTTCACCCTGACCAT |
| | | CAGCCGGCTGGAACCCGAGGACTTCGCCGTGTACTACT |
| | | GCCAGCAGGGCCAGGTGATCCCCCCCACCTTCGGCCAG |
| | | GGCACCAAGGTGGAAATCAAGAGCTCCGCTAGCACCA |
| | | AGGGCCCCTCCGTGTTTCCTCTGGCCCCCAGCAGCAAG |
| | | AGCACCTCTGGCGGAACAGCCGCCCTGGGCTGCCTGGT |
| | | GAAAGACTACTTCCCCGAGCCCGTGACCGTGTCCTGGA |
| | | ACTCTGGCGCCCTGACCAGCGGCGTGCACACCTTTCCA |
| | | GCCGTGCTGCAGAGCAGCGGCCTGTACTCCCTGAGCAG |
| | | CGTGGTGACAGTGCCCTCCAGCAGCCTGGGCACCCAGA |
| | | CCTACATCTGCAACGTGAACCACAAGCCCAGCAACACC |
| | | AAAGTGGACAAGAAGGTGGAACCCAAGAGCTGCGAC |
| 308 | (12B3) VHCH1- | QVQLVQSGAEVKKPGSSVKVSCKASGGTFSSYAISWVRQ |
| | Heavy chain- | APGQGLEWMGGIIPIFGTANYAQKFQGRVTITADKSTSTA |
| | (28H1) VHCL | YMELSSLRSEDTAVYYCARSEFRFYADFDYWGQGTTVTV |
| | | SSASTKGPSVFPLAPSSKSTSGGTAALGCLVKDYFPEPVTV |
| | | SWNSGALTSGVHTFPAVLQSSGLYSLSSVVTVPSSSLGTQ |
| | | TYICNVNHKPSNTKVDKKVEPKSCDKTHTCPPCPAPEAA |
| | | GGPSVFLFPPKPKDTLMISRTPEVTCVVVDVSHEDPEVKF |
| | | NWYVDGVEVHNAKTKPREEQYNSTYRVVSVLTVLHQD |
| | | WLNGKEYKCKVSNKALGAPIEKTISKAKGQPREPQVYTL |
| | | PPSRDELTKNQVSLTCLVKGFYPSDIAVEWESNGQPENNY |
| | | KTTPPVLDSDGSFFLYSKLTVDKSRWQQGNVFSCSVMHE |
| | | ALHNHYTQKSLSLSPGGGGGSGGGGSGGGGSGGGGSEV |
| | | QLLESGGGLVQPGGSLRLSCAASGFTFSSHAMSWVRQAP |
| | | GKGLEWVSAIWASGEQYYADSVKGRFTISRDNSKNTLYL |
| | | QMNSLRAEDTAVYYCAKGWLGNFDYWGQGTLVTVSSA |
| | | SVAAPSVFIFPPSDEQLKSGTASVVCLLNNFYPREAKVQW |
| | | KVDNALQSGNSQESVTEQDSKDSTYSLSSTLTLSKADYEK |
| | | HKVYACEVTHQGLSSPVTKSFNRGEC |
| 289 | VLCL-Light chain | see Table 48 |
| | 1 (12B3) | |
| 186 | VLCH1-Light | EIVLTQSPGTLSLSPGERATLSCRASQSVSRSYLAWYQQK |
| | chain 2 (28H1) | PGQAPRLLIIGASTRATGIPDRFSGSGSGTDFTLTISRLEPE |
| | | DFAVYYCQQGQVIPPTFGQGTKVEIKSSASTKGPSVFPLA |
| | | PSSKSTSGGTAALGCLVKDYFPEPVTVSWNSGALTSGVH |
| | | TFPAVLQSSGLYSLSSVVTVPSSSLGTQTYICNVNHKPSNT |
| | | KVDKKVEPKSCD |
| 309 | (25G7) VHCH1- | GAGGTGCAATTGTTGGAGTCTGGGGGAGGCTTGGTACA |
| | Heavy chain- | GCCTGGGGGGTCCCTGAGACTCTCCTGTGCAGCCTCCG |
| | (28H1) VHCL | GATTCACCTTTAGCAGTTATGCCATGAGCTGGGTCCGC |
| | (nucleotide | CAGGCTCCAGGGAAGGGGCTGGAGTGGGTCTCAGCTA |
| | sequence) | TTAGTGGTAGTGGTGGTAGCACATACTACGCAGACTCC |
| | | GTGAAGGGCCGGTTCACCATCTCCAGAGACAATTCCAA |
| | | GAACACGCTGTATCTGCAGATGAACAGCCTGAGAGCC |
| | | GAGGACACGGCCGTATATTACTGTGCGCGTGACGACCC |
| | | GTGGCCGCCGTTCGACTACTGGGGCCAAGGAACCCTGG |
| | | TCACCGTCTCGAGTGCTAGCACCAAGGGCCCATCCGTG |
| | | TTCCCTCTGGCCCCTTCCAGCAAGTCTACCTCTGGCGGC |
| | | ACAGCCGCTCTGGGCTGCCTCGTGAAGGACTACTTCCC |
| | | CGAGCCTGTGACAGTGTCCTGGAACTCTGGCGCCCTGA |
| | | CATCCGGCGTGCACACCTTTCCAGCTGTGCTGCAGTCC |
| | | TCCGGCCTGTACTCCCTGTCCTCCGTCGTGACAGTGCCC |
| | | TCCAGCTCTCTGGGCACCCAGACCTACATCTGCAACGT |
| | | GAACCACAAGCCCTCCAACACCAAGGTGGACAAGAAG |
| | | GTGGAACCCAAGTCCTGCGACAAGACCCACACCTGTCC |
| | | CCCTTGTCCTGCCCCTGAAGCTGCTGGCGGCCCTAGCG |
| | | TGTTCCTGTTCCCCCCAAAGCCCAAGGACACCCTGATG |
| | | ATCTCCCGGACCCCCGAAGTGACCTGCGTGGTGGTGGA |
| | | TGTGTCCCACGAGGACCCTGAAGTGAAGTTCAATTGGT |
| | | ACGTGGACGGCGTGGAAGTGCACAATGCCAAGACCAA |
| | | GCCTAGAGAGGAACAGTACAACTCCACCTACCGGGTG |
| | | GTGTCCGTGCTGACCGTGCTGCACCAGGATTGGCTGAA |
| | | CGGCAAAGAGTACAAGTGCAAGGTGTCCAACAAGGCC |
| | | CTGGGAGCCCCCATCGAAAAGACCATCTCCAAGGCCA |
| | | AGGGCCAGCCTCGCGAGCCTCAGGTGTACACCCTGCCC |
| | | CCTAGCAGAGATGAGCTGACCAAGAACCAGGTGTCCCT |
| | | GACCTGTCTCGTGAAAGGCTTCTACCCCTCCGATATCG |
| | | CCGTGGAATGGGAGAGCAACGGCCAGCCCGAGAACAA |
| | | CTACAAGACCACCCCCCCTGTGCTGGACTCCGACGGCT |
| | | CATTCTTCCTGTACTCTAAGCTGACAGTGGACAAGTCC |
| | | CGGTGGCAGCAGGGCAACGTGTTCTCCTGCTCCGTGAT |
| | | GCACGAGGCCCTGCACAACCACTACACCCAGAAGTCCC |
| | | TGTCCCTGTCTCCCGGGGGAGGCGGAGGATCTGGCGGA |
| | | GGCGGATCCGGTGGTGGCGGATCTGGGGGCGGTGGAT |
| | | CTGAGGTGCAGCTGCTGGAATCTGGGGGAGGACTGGT |
| | | GCAGCCAGGCGGATCTCTGAGGCTGTCCTGCGCTGCTT |
| | | CCGGCTTTACCTTCTCCAGCCACGCCATGAGTTGGGTG |
| | | CGCCAGGCACCCGGAAAAGGACTGGAATGGGTGTCAG |
| | | CCATCTGGGCCTCCGGCGAGCAGTACTACGCCGATAGC |
| | | GTGAAGGGCCGGTTCACCATCTCTCGGGATAACAGCAA |
| | | GAATACTCTGTACCTGCAGATGAACTCCCTGCGCGCTG |
| | | AAGATACCGCTGTGTATTACTGCGCCAAGGGCTGGCTG |
| | | GGCAACTTCGATTACTGGGGCCAGGGAACCCTCGTGAC |
| | | TGTCTCGAGCGCTTCTGTGGCCGCTCCCTCCGTGTTCAT |
| | | CTTCCCACCTTCCGACGAGCAGCTGAAGTCCGGCACTG |
| | | CCTCTGTCGTGTGCCTGCTGAACAACTTCTACCCTCGGG |
| | | AAGCCAAGGTGCAGTGGAAAGTGGATAACGCCCTGCA |
| | | GTCCGGCAACTCCCAGGAATCCGTGACCGAGCAGGACT |
| | | CCAAGGACAGCACCTACTCCCTGAGCAGCACCCTGACC |
| | | CTGTCCAAGGCCGACTACGAGAAGCACAAGGTGTACG |
| | | CCTGTGAAGTGACCCACCAGGGCCTGTCCAGCCCCGTG |
| | | ACCAAGTCCTTCAACCGGGGCGAGTGC |
| 291 | VLCL-Light chain | see Table 48 |
| | 1 (25G7) | |
| | (nucleotide | |
| | sequence) | |
| 184 | VLCH1-Light | see above |
| | chain 2 (28H1) | |
| | (nucleotide | |
| | sequence) | |
| 310 | (25G7) VHCH1- | EVQLLESGGGLVQPGGSLRLSCAASGFTFSSYAMSWVRQ |
| | Heavy chain- | APGKGLEWVSAISGSGGSTYYADSVKGRFTISRDNSKNTL |
| | (28H1) VHCL | YLQMNSLRAEDTAVYYCARDDPWPPFDYWGQGTLVTVS |
| | | SASTKGPSVFPLAPSSKSTSGGTAALGCLVKDYFPEPVTVS |
| | | WNSGALTSGVHTFPAVLQSSGLYSLSSVVTVPSSSLGTQT |
| | | YICNVNHKPSNTKVDKKVEPKSCDKTHTCPPCPAPEAAG |
| | | GPSVFLFPPKPKDTLMISRTPEVTCVVVDVSHEDPEVKFN |
| | | WYVDGVEVHNAKTKPREEQYNSTYRVVSVLTVLHQDW |
| | | LNGKEYKCKVSNKALGAPIEKTISKAKGQPREPQVYTLPP |
| | | SRDELTKNQVSLTCLVKGFYPSDIAVEWESNGQPENNYK |
| | | TTPPVLDSDGSFFLYSKLTVDKSRWQQGNVFSCSVMHEA |
| | | LHNHYTQKSLSLSPGGGGGSGGGGSGGGGSGGGGSEVQL |
| | | LESGGGLVQPGGSLRLSCAASGFTFSSHAMSWVRQAPGK |
| | | GLEWVSAIWASGEQYYADSVKGRFTISRDNSKNTLYLQM |
| | | NSLRAEDTAVYYCAKGWLGNFDYWGQGTLVTVSSASVA |
| | | APSVFIFPPSDEQLKSGTASVVCLLNNFYPREAKVQWKVD |
| | | NALQSGNSQESVTEQDSKDSTYSLSSTLTLSKADYEKHKV |
| | | YACEVTHQGLSSPVTKSFNRGEC |
| 293 | VLCL-Light chain | see Table 48 |
| | 1 (25G7) | |
| 186 | VLCH1-Light | see above |
| | chain 2 (28H1) | |
| 311 | (11D5) VHCH1- | CAGGTGCAATTGGTGCAGTCTGGGGCTGAGGTGAAGA |
| | Heavy chain- | AGCCTGGGTCCTCGGTGAAGGTCTCCTGCAAGGCCTCC |
| | (28H1) VHCL | GGAGGCACATTCAGCAGCTACGCTATAAGCTGGGTGCG |
| | (nucleotide | ACAGGCCCCTGGACAAGGGCTCGAGTGGATGGGAGGG |
| | sequence) | ATCATCCCTATCTTTGGTACAGCAAACTACGCACAGAA |
| | | GTTCCAGGGCAGGGTCACCATTACTGCAGACAAATCCA |
| | | CGAGCACAGCCTACATGGAGCTGAGCAGCCTGAGATCT |
| | | GAGGACACCGCCGTGTATTACTGTGCGAGATCTACTCT |
| | | GATCTACGGTTACTTCGACTACTGGGGCCAAGGGACCA |
| | | CCGTGACCGTCTCCTCAGCTAGCACCAAGGGCCCATCC |
| | | GTGTTCCCTCTGGCCCCTTCCAGCAAGTCTACCTCTGGC |
| | | GGCACAGCCGCTCTGGGCTGCCTCGTGAAGGACTACTT |
| | | CCCCGAGCCTGTGACAGTGTCCTGGAACTCTGGCGCCC |
| | | TGACATCCGGCGTGCACACCTTTCCAGCTGTGCTGCAG |
| | | TCCTCCGGCCTGTACTCCCTGTCCTCCGTCGTGACAGTG |
| | | CCCTCCAGCTCTCTGGGCACCCAGACCTACATCTGCAA |
| | | CGTGAACCACAAGCCCTCCAACACCAAGGTGGACAAG |
| | | AAGGTGGAACCCAAGTCCTGCGACAAGACCCACACCT |
| | | GTCCCCCTTGTCCTGCCCCTGAAGCTGCTGGCGGCCCT |
| | | AGCGTGTTCCTGTTCCCCCCAAAGCCCAAGGACACCCT |
| | | GATGATCTCCCGGACCCCCGAAGTGACCTGCGTGGTGG |
| | | TGGATGTGTCCCACGAGGACCCTGAAGTGAAGTTCAAT |
| | | TGGTACGTGGACGGCGTGGAAGTGCACAATGCCAAGA |
| | | CCAAGCCTAGAGAGGAACAGTACAACTCCACCTACCG |
| | | GGTGGTGTCCGTGCTGACCGTGCTGCACCAGGATTGGC |
| | | TGAACGGCAAAGAGTACAAGTGCAAGGTGTCCAACAA |
| | | GGCCCTGGGAGCCCCCATCGAAAAGACCATCTCCAAG |
| | | GCCAAGGGCCAGCCTCGCGAGCCTCAGGTGTACACCCT |
| | | GCCCCCTAGCAGAGATGAGCTGACCAAGAACCAGGTG |
| | | TCCCTGACCTGTCTCGTGAAAGGCTTCTACCCCTCCGAT |
| | | ATCGCCGTGGAATGGGAGAGCAACGGCCAGCCCGAGA |
| | | ACAACTACAAGACCACCCCCCCTGTGCTGGACTCCGAC |
| | | GGCTCATTCTTCCTGTACTCTAAGCTGACAGTGGACAA |
| | | GTCCCGGTGGCAGCAGGGCAACGTGTTCTCCTGCTCCG |
| | | TGATGCACGAGGCCCTGCACAACCACTACACCCAGAA |
| | | GTCCCTGTCCCTGTCTCCCGGGGGAGGCGGAGGATCTG |
| | | GCGGAGGCGGATCCGGTGGTGGCGGATCTGGGGGCGG |
| | | TGGATCTGAGGTGCAGCTGCTGGAATCTGGGGGAGGA |
| | | CTGGTGCAGCCAGGCGGATCTCTGAGGCTGTCCTGCGC |
| | | TGCTTCCGGCTTTACCTTCTCCAGCCACGCCATGAGTTG |
| | | GGTGCGCCAGGCACCCGGAAAAGGACTGGAATGGGTG |
| | | TCAGCCATCTGGGCCTCCGGCGAGCAGTACTACGCCGA |
| | | TAGCGTGAAGGGCCGGTTCACCATCTCTCGGGATAACA |
| | | GCAAGAATACTCTGTACCTGCAGATGAACTCCCTGCGC |
| | | GCTGAAGATACCGCTGTGTATTACTGCGCCAAGGGCTG |
| | | GCTGGGCAACTTCGATTACTGGGGCCAGGGAACCCTCG |
| | | TGACTGTCTCGAGCGCTTCTGTGGCCGCTCCCTCCGTGT |
| | | TCATCTTCCCACCTTCCGACGAGCAGCTGAAGTCCGGC |
| | | ACTGCCTCTGTCGTGTGCCTGCTGAACAACTTCTACCCT |
| | | CGGGAAGCCAAGGTGCAGTGGAAAGTGGATAACGCCC |
| | | TGCAGTCCGGCAACTCCCAGGAATCCGTGACCGAGCAG |
| | | GACTCCAAGGACAGCACCTACTCCCTGAGCAGCACCCT |
| | | GACCCTGTCCAAGGCCGACTACGAGAAGCACAAGGTG |
| | | TACGCCTGTGAAGTGACCCACCAGGGCCTGTCCAGCCC |
| | | CGTGACCAAGTCCTTCAACCGGGGCGAGTGC |
| 295 | VLCL-Light chain | see Table 48 |
| | 1 (11D5) | |
| | (nucleotide | |
| | sequence) | |
| 184 | VLCH1-Light | see above |
| | chain 2 (28H1) | |
| | (nucleotide | |
| | sequence) | |
| 312 | (11D5) VHCH1- | QVQLVQSGAEVKKPGSSVKVSCKASGGTFSSYAISWVRQ |
| | Heavy chain- | APGQGLEWMGGIIPIFGTANYAQKFQGRVTITADKSTSTA |
| | (28H1) VHCL | YMELSSLRSEDTAVYYCARSTLIYGYFDYWGQGTTVTVS |
| | | SASTKGPSVFPLAPSSKSTSGGTAALGCLVKDYFPEPVTVS |
| | | WNSGALTSGVHTFPAVLQSSGLYSLSSVVTVPSSSLGTQT |
| | | YICNVNHKPSNTKVDKKVEPKSCDKTHTCPPCPAPEAAG |
| | | GPSVFLFPPKPKDTLMISRTPEVTCVVVDVSHEDPEVKFN |
| | | WYVDGVEVHNAKTKPREEQYNSTYRVVSVLTVLHQDW |
| | | LNGKEYKCKVSNKALGAPIEKTISKAKGQPREPQVYTLPP |
| | | SRDELTKNQVSLTCLVKGFYPSDIAVEWESNGQPENNYK |
| | | TTPPVLDSDGSFFLYSKLTVDKSRWQQGNVFSCSVMHEA |
| | | LHNHYTQKSLSLSPGGGGGSGGGGSGGGGSGGGGSEVQL |
| | | LESGGGLVQPGGSLRLSCAASGFTFSSHAMSWVRQAPGK |
| | | GLEWVSAIWASGEQYYADSVKGRFTISRDNSKNTLYLQM |
| | | NSLRAEDTAVYYCAKGWLGNFDYWGQGTLVTVSSASVA |
| | | APSVFIFPPSDEQLKSGTASVVCLLNNFYPREAKVQWKVD |
| | | NALQSGNSQESVTEQDSKDSTYSLSSTLTLSKADYEKHKV |
| | | YACEVTHQGLSSPVTKSFNRGEC |
| 297 | VLCL-Light chain | see Table 48 |
| | 1 (11D5) | |
| 186 | VLCH1-Light | see above |
| | chain 2 (28H1) | |

[0885] All genes were transiently expressed under control of a chimeric MPSV promoter consisting of the MPSV core promoter combined with the CMV promoter enhancer fragment. The expression vector also contains the oriP region for episomal replication in EBNA (Epstein Barr Virus Nuclear Antigen) containing host cells.

[0886] The bispecific anti-4-1BB/anti-FAP constructs were produced by co-transfecting HEK293-EBNA cells with the mammalian expression vectors using polyethylenimine. The cells were transfected with the corresponding expression vectors in a 1:1:1 ratio (“vector heavy chain”:“vector light chain1”:“vector light chain2”).

[0887] For production in 500 mL shake flasks, 400 million HEK293 EBNA cells were seeded 24 hours before transfection. For transfection cells were centrifuged for 5 minutes by 210×g, and supernatant was replaced by pre-warmed CD CHO medium. Expression vectors were mixed in 20 mL CD CHO medium to a final amount of 200 μg DNA. After addition of 540 μL PEI, the solution was vortexed for 15 seconds and incubated for 10 minutes at room temperature. Afterwards, cells were mixed with the DNA/PEI solution, transferred to a 500 mL shake flask and incubated for 3 hours at 37° C. in an incubator with a 5% CO₂ atmosphere. After the incubation, 160 mL F17 medium was added and cells were cultured for 24 hours. One day after transfection 1 mM valproic acid and 7% Feed were added. After culturing for 7 days, the cell supernatant was collected by centrifugation for 15 minutes at 210×g. The solution was sterile filtered (0.22 μm filter), supplemented with sodium azide to a final concentration of 0.01% (w/v), and kept at 4° C.

[0888] Purification of bispecific constructs from cell culture supernatants was carried out by affinity chromatography using Protein A as described above for purification of antigen-Fc fusions and antibodies.

[0889] The protein was concentrated and filtered prior to loading on a HiLoad Superdex 200 column (GE Healthcare) equilibrated with 20 mM Histidine, 140 mM NaCl solution of pH 6.0.

[0890] The protein concentration of purified bispecific constructs was determined by measuring the

[0891] OD at 280 nm, using the molar extinction coefficient calculated on the basis of the amino acid sequence. Purity and molecular weight of the bispecific constructs were analyzed by CE-SDS in the presence and absence of a reducing agent (Invitrogen, USA) using a LabChipGXII (Caliper). The aggregate content of bispecific constructs was analyzed using a TSKgel G3000 SW XL analytical size-exclusion column (Tosoh) equilibrated in a 25 mM K₂HPO₄, 125 mM NaCl, 200 mM L-Arginine Monohydrocloride, 0.02% (w/v) NaN₃, pH 6.7 running buffer at 25° C. (Table 60).

TABLE 60
Biochemical analysis of bispecific, bivalent anti-4-1BB/anti-FAP
IgG1 P329G LALA antigen binding molecules

| | Monomer | Yield |
|---|---|---|
| Clone | [%] | [mg/l] |
| 12B3/FAP P329GLALA IgG1 | 97.6 | 6.8 |
| 2 + 2 | | |
| 25G7/FAP P329GLALA IgG1 | 98.4 | 13 |
| 2 + 2 | | |
| 11D5/FAP P329GLALA IgG1 | 100 | 8.7 |
| 2 + 2 | | |

### 9.2 Generation of Bispecific Antibodies Targeting 4-1BB and Fibroblast Activation Protein (FAP) in Monovalent Format (1+1 Format, Comparative Examples)

[0892] Bispecific agonistic 4-1BB antibodies with monovalent binding for 4-1BB and for FAP were prepared. The crossmab technology was applied to reduce the formation of wrongly paired light chains as described in International patent application No. WO 2010/145792 A1.

[0893] The generation and preparation of the FAP binders is described in WO 2012/020006 A2, which is incorporated herein by reference.

[0894] The bispecific construct binds monovalently to 4-1BB and to FAP (FIG. 40B). It contains a crossed Fab unit (VHCL) of the FAP binder fused to the knob heavy chain of an anti-4-1BB huIgG1 (containing the S354C/T366W mutations). The Fc hole heavy chain (containing the Y349C/T366S/L368A/Y407V mutations) is fused to a Fab against anti-4-1BB. Combination of the targeted anti-FAP-Fc knob with the anti-4-1BB-Fc hole chain allows generation of a heterodimer, which includes a Fab that specifically binds to FAP and a Fab that specifically binds to 4-1BB.

[0895] The Pro329Gly, Leu234Ala and Leu235Ala mutations have been introduced in the constant region of the knob and hole heavy chains to abrogate binding to Fc gamma receptors according to the method described in International Patent Appl. Publ. No. WO 2012/130831 A1.

[0896] The bispecific monovalent anti-4-1BB and anti-FAP huIgG1 P329GLALA were produced by co-transfecting HEK293-EBNA cells with the mammalian expression vectors using polyethylenimine. The cells were transfected with the corresponding expression vectors in a 1:1:1:1 ratio (“vector knob heavy chain”:“vector light chain1”:“vector hole heavy chain”:“vector light chain2”).

[0897] The resulting bispecific, monovalent constructs were produced and purified as described for the bispecific bivalent anti-4-1BB and anti-FAP huIgG1 P329GLALA (see Example 9.1). The nucleotide and amino acid sequences can be found in Table 61.

TABLE 61
cDNA and amino acid sequences of mature bispecific monovalent
anti-4-1BB/anti-FAP huIgG1 P329GLALA kih antibodies

| SEQ ID | | |
|---|---|---|
| NO: | Description | Sequence |
| 197 | (28H1) VHCL-heavy | GAAGTGCAGCTGCTGGAATCCGGCGGAGGCCTGGTG |
| | chain hole | CAGCCTGGCGGATCTCTGAGACTGTCCTGCGCCGCC |
| | (nucleotide sequence) | TCCGGCTTCACCTTCTCCTCCCACGCCATGTCCTGGG |
| | | TCCGACAGGCTCCTGGCAAAGGCCTGGAATGGGTGT |
| | | CCGCCATCTGGGCCTCCGGCGAGCAGTACTACGCCG |
| | | ACTCTGTGAAGGGCCGGTTCACCATCTCCCGGGACA |
| | | ACTCCAAGAACACCCTGTACCTGCAGATGAACTCCC |
| | | TGCGGGCCGAGGACACCGCCGTGTACTACTGTGCCA |
| | | AGGGCTGGCTGGGCAACTTCGACTACTGGGGACAGG |
| | | GCACCCTGGTCACCGTGTCCAGCGCTAGCGTGGCCG |
| | | CTCCCAGCGTGTTCATCTTCCCACCCAGCGACGAGC |
| | | AGCTGAAGTCCGGCACAGCCAGCGTGGTGTGCCTGC |
| | | TGAACAACTTCTACCCCCGCGAGGCCAAGGTGCAGT |
| | | GGAAGGTGGACAACGCCCTGCAGAGCGGCAACAGC |
| | | CAGGAATCCGTGACCGAGCAGGACAGCAAGGACTC |
| | | CACCTACAGCCTGAGCAGCACCCTGACCCTGAGCAA |
| | | GGCCGACTACGAGAAGCACAAGGTGTACGCCTGCG |
| | | AAGTGACCCACCAGGGCCTGTCCAGCCCCGTGACCA |
| | | AGAGCTTCAACCGGGGCGAGTGCGACAAGACCCAC |
| | | ACCTGTCCCCCTTGCCCTGCCCCTGAAGCTGCTGGTG |
| | | GCCCTTCCGTGTTCCTGTTCCCCCCAAAGCCCAAGG |
| | | ACACCCTGATGATCAGCCGGACCCCCGAAGTGACCT |
| | | GCGTGGTGGTCGATGTGTCCCACGAGGACCCTGAAG |
| | | TGAAGTTCAATTGGTACGTGGACGGCGTGGAAGTGC |
| | | ACAATGCCAAGACCAAGCCGCGGGAGGAGCAGTAC |
| | | AACAGCACGTACCGTGTGGTCAGCGTCCTCACCGTC |
| | | CTGCACCAGGACTGGCTGAATGGCAAGGAGTACAA |
| | | GTGCAAGGTCTCCAACAAAGCCCTCGGCGCCCCCAT |
| | | CGAGAAAACCATCTCCAAAGCCAAAGGGCAGCCCC |
| | | GAGAACCACAGGTGTGCACCCTGCCCCCATCCCGGG |
| | | ATGAGCTGACCAAGAACCAGGTCAGCCTCTCGTGCG |
| | | CAGTCAAAGGCTTCTATCCCAGCGACATCGCCGTGG |
| | | AGTGGGAGAGCAATGGGCAGCCGGAGAACAACTAC |
| | | AAGACCACGCCTCCCGTGCTGGACTCCGACGGCTCC |
| | | TTCTTCCTCGTGAGCAAGCTCACCGTGGACAAGAGC |
| | | AGGTGGCAGCAGGGGAACGTCTTCTCATGCTCCGTG |
| | | ATGCATGAGGCTCTGCACAACCACTACACGCAGAAG |
| | | AGCCTCTCCCTGTCTCCGGGTAAA |
| 184 | (28H1) VLCH1-Light | GAGATCGTGCTGACCCAGTCTCCCGGCACCCTGAGC |
| | chain 2 (nucleotide | CTGAGCCCTGGCGAGAGAGCCACCCTGAGCTGCAGA |
| | sequence) | GCCAGCCAGAGCGTGAGCCGGAGCTACCTGGCCTGG |
| | | TATCAGCAGAAGCCCGGCCAGGCCCCCAGACTGCTG |
| | | ATCATCGGCGCCAGCACCCGGGCCACCGGCATCCCC |
| | | GATAGATTCAGCGGCAGCGGCTCCGGCACCGACTTC |
| | | ACCCTGACCATCAGCCGGCTGGAACCCGAGGACTTC |
| | | GCCGTGTACTACTGCCAGCAGGGCCAGGTGATCCCC |
| | | CCCACCTTCGGCCAGGGCACCAAGGTGGAAATCAAG |
| | | AGCTCCGCTAGCACCAAGGGCCCCTCCGTGTTTCCT |
| | | CTGGCCCCCAGCAGCAAGAGCACCTCTGGCGGAACA |
| | | GCCGCCCTGGGCTGCCTGGTGAAAGACTACTTCCCC |
| | | GAGCCCGTGACCGTGTCCTGGAACTCTGGCGCCCTG |
| | | ACCAGCGGCGTGCACACCTTTCCAGCCGTGCTGCAG |
| | | AGCAGCGGCCTGTACTCCCTGAGCAGCGTGGTGACA |
| | | GTGCCCTCCAGCAGCCTGGGCACCCAGACCTACATC |
| | | TGCAACGTGAACCACAAGCCCAGCAACACCAAAGT |
| | | GGACAAGAAGGTGGAACCCAAGAGCTGCGAC |
| 198 | (28H1) VHCL-heavy | EVQLLESGGGLVQPGGSLRLSCAASGFTFSSHAMSWV |
| | chain hole | RQAPGKGLEWVSAIWASGEQYYADSVKGRFTISRDNS |
| | | KNTLYLQMNSLRAEDTAVYYCAKGWLGNFDYWGQG |
| | | TLVTVSSASVAAPSVFIFPPSDEQLKSGTASVVCLLNNF |
| | | YPREAKVQWKVDNALQSGNSQESVTEQDSKDSTYSLS |
| | | STLTLSKADYEKHKVYACEVTHQGLSSPVTKSFNRGE |
| | | CDKTHTCPPCPAPEAAGGPSVFLFPPKPKDTLMISRTPE |
| | | VTCVVVDVSHEDPEVKFNWYVDGVEVHNAKTKPREE |
| | | QYNSTYRVVSVLTVLHQDWLNGKEYKCKVSNKALGA |
| | | PIEKTISKAKGQPREPQVCTLPPSRDELTKNQVSLSCAV |
| | | KGFYPSDIAVEWESNGQPENNYKTTPPVLDSDGSFFLV |
| | | SKLTVDKSRWQQGNVFSCSVMHEALHNHYTQKSLSLS |
| | | PGK |
| 186 | (28H1) VLCH1-Light | EIVLTQSPGTLSLSPGERATLSCRASQSVSRSYLAWYQ |
| | chain 2 | QKPGQAPRLLIIGASTRATGIPDRFSGSGSGTDFTLTISR |
| | | LEPEDFAVYYCQQGQVIPPTFGQGTKVEIKSSASTKGPS |
| | | VFPLAPSSKSTSGGTAALGCLVKDYFPEPVTVSWNSGA |
| | | LTSGVHTFPAVLQSSGLYSLSSVVTVPSSSLGTQTYICN |
| | | VNHKPSNTKVDKKVEPKSCD |
| 313 | (12B3) VHCH1-heavy | CAGGTGCAATTGGTGCAGTCTGGGGCTGAGGTGAAG |
| | chain knob | AAGCCTGGGTCCTCGGTGAAGGTCTCCTGCAAGGCC |
| | (nucleotide sequence) | TCCGGAGGCACATTCAGCAGCTACGCTATAAGCTGG |
| | | GTGCGACAGGCCCCTGGACAAGGGCTCGAGTGGAT |
| | | GGGAGGGATCATCCCTATCTTTGGTACAGCAAACTA |
| | | CGCACAGAAGTTCCAGGGCAGGGTCACCATTACTGC |
| | | AGACAAATCCACGAGCACAGCCTACATGGAGCTGA |
| | | GCAGCCTGAGATCTGAGGACACCGCCGTGTATTACT |
| | | GTGCGAGATCTGAATTCCGTTTCTACGCTGACTTCGA |
| | | CTACTGGGGCCAAGGGACCACCGTGACCGTCTCCTC |
| | | AGCTAGCACCAAGGGCCCTAGCGTGTTCCCTCTGGC |
| | | CCCTAGCAGCAAGAGCACAAGTGGAGGAACAGCCG |
| | | CCCTGGGCTGCCTGGTCAAGGACTACTTCCCCGAGC |
| | | CCGTGACCGTGTCCTGGAATTCTGGCGCCCTGACAA |
| | | GCGGCGTGCACACATTTCCAGCCGTGCTGCAGAGCA |
| | | GCGGCCTGTACTCTCTGAGCAGCGTCGTGACCGTGC |
| | | CCTCTAGCTCTCTGGGCACCCAGACCTACATCTGCA |
| | | ACGTGAACCACAAGCCCAGCAACACCAAAGTGGAC |
| | | AAGAAGGTGGAACCCAAGAGCTGCGACAAGACCCA |
| | | CACCTGTCCCCCTTGCCCTGCCCCTGAAGCTGCTGGT |
| | | GGCCCTTCCGTGTTCCTGTTCCCCCCAAAGCCCAAG |
| | | GACACCCTGATGATCAGCCGGACCCCCGAAGTGACC |
| | | TGCGTGGTGGTCGATGTGTCCCACGAGGACCCTGAA |
| | | GTGAAGTTCAATTGGTACGTGGACGGCGTGGAAGTG |
| | | CACAATGCCAAGACCAAGCCGCGGGAGGAGCAGTA |
| | | CAACAGCACGTACCGTGTGGTCAGCGTCCTCACCGT |
| | | CCTGCACCAGGACTGGCTGAATGGCAAGGAGTACA |
| | | AGTGCAAGGTCTCCAACAAAGCCCTCGGCGCCCCCA |
| | | TCGAGAAAACCATCTCCAAAGCCAAAGGGCAGCCC |
| | | CGAGAACCACAGGTGTACACCCTGCCCCCATGCCGG |
| | | GATGAGCTGACCAAGAACCAGGTCAGCCTGTGGTGC |
| | | CTGGTCAAAGGCTTCTATCCCAGCGACATCGCCGTG |
| | | GAGTGGGAGAGCAATGGGCAGCCGGAGAACAACTA |
| | | CAAGACCACGCCTCCCGTGCTGGACTCCGACGGCTC |
| | | CTTCTTCCTCTACAGCAAGCTCACCGTGGACAAGAG |
| | | CAGGTGGCAGCAGGGGAACGTCTTCTCATGCTCCGT |
| | | GATGCATGAGGCTCTGCACAACCACTACACGCAGAA |
| | | GAGCCTCTCCCTGTCTCCGGGTAAA |
| 287 | (12B3) VLCL-Light | see Table 48 |
| | chain 1 (nucleotide | |
| | sequence) | |
| 314 | (12B3) VHCH1-heavy | QVQLVQSGAEVKKPGSSVKVSCKASGGTFSSYAISWV |
| | chain knob | RQAPGQGLEWMGGIIPIFGTANYAQKFQGRVTITADKS |
| | | TSTAYMELSSLRSEDTAVYYCARSEFRFYADFDYWGQ |
| | | GTTVTVSSASTKGPSVFPLAPSSKSTSGGTAALGCLVK |
| | | DYFPEPVTVSWNSGALTSGVHTFPAVLQSSGLYSLSSV |
| | | VTVPSSSLGTQTYICNVNHKPSNTKVDKKVEPKSCDKT |
| | | HTCPPCPAPEAAGGPSVFLFPPKPKDTLMISRTPEVTCV |
| | | VVDVSHEDPEVKFNWYVDGVEVHNAKTKPREEQYNS |
| | | TYRVVSVLTVLHQDWLNGKEYKCKVSNKALGAPIEKT |
| | | ISKAKGQPREPQVYTLPPCRDELTKNQVSLWCLVKGF |
| | | YPSDIAVEWESNGQPENNYKTTPPVLDSDGSFFLYSKL |
| | | TVDKSRWQQGNVFSCSVMHEALHNHYTQKSLSLSPGK |
| 289 | (12B3) VLCL-Light | see Table 48 |
| | chain 1 | |
| 315 | (25G7) VHCH1-heavy | GAGGTGCAATTGTTGGAGTCTGGGGGAGGCTTGGTA |
| | chain knob | CAGCCTGGGGGGTCCCTGAGACTCTCCTGTGCAGCC |
| | (nucleotide sequence) | TCCGGATTCACCTTTAGCAGTTATGCCATGAGCTGG |
| | | GTCCGCCAGGCTCCAGGGAAGGGGCTGGAGTGGGT |
| | | CTCAGCTATTAGTGGTAGTGGTGGTAGCACATACTA |
| | | CGCAGACTCCGTGAAGGGCCGGTTCACCATCTCCAG |
| | | AGACAATTCCAAGAACACGCTGTATCTGCAGATGAA |
| | | CAGCCTGAGAGCCGAGGACACGGCCGTATATTACTG |
| | | TGCGCGTGACGACCCGTGGCCGCCGTTCGACTACTG |
| | | GGGCCAAGGAACCCTGGTCACCGTCTCGAGTGCTAG |
| | | CACCAAGGGCCCTAGCGTGTTCCCTCTGGCCCCTAG |
| | | CAGCAAGAGCACAAGTGGAGGAACAGCCGCCCTGG |
| | | GCTGCCTGGTCAAGGACTACTTCCCCGAGCCCGTGA |
| | | CCGTGTCCTGGAATTCTGGCGCCCTGACAAGCGGCG |
| | | TGCACACATTTCCAGCCGTGCTGCAGAGCAGCGGCC |
| | | TGTACTCTCTGAGCAGCGTCGTGACCGTGCCCTCTA |
| | | GCTCTCTGGGCACCCAGACCTACATCTGCAACGTGA |
| | | ACCACAAGCCCAGCAACACCAAAGTGGACAAGAAG |
| | | GTGGAACCCAAGAGCTGCGACAAGACCCACACCTGT |
| | | CCCCCTTGCCCTGCCCCTGAAGCTGCTGGTGGCCCTT |
| | | CCGTGTTCCTGTTCCCCCCAAAGCCCAAGGACACCC |
| | | TGATGATCAGCCGGACCCCCGAAGTGACCTGCGTGG |
| | | TGGTCGATGTGTCCCACGAGGACCCTGAAGTGAAGT |
| | | TCAATTGGTACGTGGACGGCGTGGAAGTGCACAATG |
| | | CCAAGACCAAGCCGCGGGAGGAGCAGTACAACAGC |
| | | ACGTACCGTGTGGTCAGCGTCCTCACCGTCCTGCAC |
| | | CAGGACTGGCTGAATGGCAAGGAGTACAAGTGCAA |
| | | GGTCTCCAACAAAGCCCTCGGCGCCCCCATCGAGAA |
| | | AACCATCTCCAAAGCCAAAGGGCAGCCCCGAGAAC |
| | | CACAGGTGTACACCCTGCCCCCATGCCGGGATGAGC |
| | | TGACCAAGAACCAGGTCAGCCTGTGGTGCCTGGTCA |
| | | AAGGCTTCTATCCCAGCGACATCGCCGTGGAGTGGG |
| | | AGAGCAATGGGCAGCCGGAGAACAACTACAAGACC |
| | | ACGCCTCCCGTGCTGGACTCCGACGGCTCCTTCTTCC |
| | | TCTACAGCAAGCTCACCGTGGACAAGAGCAGGTGGC |
| | | AGCAGGGGAACGTCTTCTCATGCTCCGTGATGCATG |
| | | AGGCTCTGCACAACCACTACACGCAGAAGAGCCTCT |
| | | CCCTGTCTCCGGGTAAA |
| 291 | (25G7) VLCL-Light | see Table 48 |
| | chain 1 (nucleotide | |
| | sequence) | |
| 316 | (25G7) VHCH1-heavy | EVQLLESGGGLVQPGGSLRLSCAASGFTFSSYAMSWV |
| | chain knob | RQAPGKGLEWVSAISGSGGSTYYADSVKGRFTISRDNS |
| | | KNTLYLQMNSLRAEDTAVYYCARDDPWPPFDYWGQ |
| | | GTLVTVSSASTKGPSVFPLAPSSKSTSGGTAALGCLVK |
| | | DYFPEPVTVSWNSGALTSGVHTFPAVLQSSGLYSLSSV |
| | | VTVPSSSLGTQTYICNVNHKPSNTKVDKKVEPKSCDKT |
| | | HTCPPCPAPEAAGGPSVFLFPPKPKDTLMISRTPEVTCV |
| | | VVDVSHEDPEVKFNWYVDGVEVHNAKTKPREEQYNS |
| | | TYRVVSVLTVLHQDWLNGKEYKCKVSNKALGAPIEKT |
| | | ISKAKGQPREPQVYTLPPCRDELTKNQVSLWCLVKGF |
| | | YPSDIAVEWESNGQPENNYKTTPPVLDSDGSFFLYSKL |
| | | TVDKSRWQQGNVFSCSVMHEALHNHYTQKSLSLSPGK |
| 293 | (25G7) VLCL-Light | see Table 48 |
| | chain 1 | |

[0898] All genes were transiently expressed under control of a chimeric MPSV promoter consisting of the MPSV core promoter combined with the CMV promoter enhancer fragment. The expression vector also contains the oriP region for episomal replication in EBNA (Epstein Barr Virus Nuclear Antigen) containing host cells.

[0899] The bispecific anti-4-1BB/anti-FAP constructs were produced by co-transfecting HEK293-EBNA cells with the mammalian expression vectors using polyethylenimine. The cells were transfected with the corresponding expression vectors in a 1:1:1:1 ratio (“vector heavy knob chain”:“vector heavy hole chain”:“vector light chain1”:“vector light chain2”).

[0900] For production in 500 mL shake flasks, 400 million HEK293 EBNA cells were seeded 24 hours before transfection. For transfection cells were centrifuged for 5 minutes by 210×g, and supernatant was replaced by pre-warmed CD CHO medium. Expression vectors were mixed in 20 mL CD CHO medium to a final amount of 200 μg DNA. After addition of 540 μL PEI, the solution was vortexed for 15 seconds and incubated for 10 minutes at room temperature. Afterwards, cells were mixed with the DNA/PEI solution, transferred to a 500 mL shake flask and incubated for 3 hours at 37° C. in an incubator with a 5% CO₂ atmosphere. After the incubation, 160 mL F17 medium was added and cells were cultured for 24 hours. One day after transfection 1 mM valproic acid and 7% Feed were added. After culturing for 7 days, the cell supernatant was collected by centrifugation for 15 minutes at 210×g. The solution was sterile filtered (0.22 μm filter), supplemented with sodium azide to a final concentration of 0.01% (w/v), and kept at 4° C.

[0901] Purification of bispecific constructs from cell culture supernatants was carried out by affinity chromatography using Protein A as described above for purification of antigen/Fc fusion molecules or antibodies. The protein concentration of purified bispecific constructs was determined by measuring the OD at 280 nm, using the molar extinction coefficient calculated on the basis of the amino acid sequence. Purity and molecular weight of the bispecific constructs were analyzed by CE-SDS in the presence and absence of a reducing agent (Invitrogen, USA) using a LabChipGXII (Caliper). The aggregate content of bispecific constructs was analyzed using a TSKgel G3000 SW XL analytical size-exclusion column (Tosoh) equilibrated in a 25 mM K2HPO4, 125 mM NaCl, 200 mM L-Arginine Monohydrocloride, 0.02% (w/v) NaN3, pH 6.7 running buffer at 25° C.

TABLE 62
Biochemical analysis of bispecific, monovalent anti-4-1BB/anti-FAP
IgG1 P329G LALA antigen binding molecules

| | Yield | Monomer |
|---|---|---|
| Clone | [mg/l] | [%] |
| 12B3/FAP P329GLALA IgG1 | 14 | 94.8 |
| 1 + 1 | | |
| 25G7/FAP P329GLALA IgG1 | 33 | 92.2 |
| 1 + 1 | | |

9.3 Generation of Bispecific Antibodies with a Bivalent Binding to 4-1BB and a Monovalent Binding to Tumor Associated Antigen (TAA) (2+1 Format, Comparative Examples)

[0902] Bispecific agonistic 4-1BB antibodies with bivalent binding for 4-1BB and monovalent binding for FAP, also termed 2+1, have been prepared as depicted in FIGS. 40C and 40D.

[0903] In this example, the first heavy chain HCl of the construct was comprised of the following components: VHCH1 of anti-4-1BB binder, followed by Fc knob, at which C-terminus a VL or VH of anti-FAP binder was fused. The second heavy chain HC2 was comprised of VHCH1 of anti-4-1BB followed by Fc hole, at which C-terminus a VH or VL, respectively, of anti-FAP binder (clone 4B9) was fused. The generation and preparation of FAP binder 4B9 is described in WO 2012/020006 A2, which is incorporated herein by reference. Binders against 4-1BB (12B3, 9B11, 11D5 and 25G7), were generated as described in Example 6. Combination of the targeted anti-FAP-Fc knob with the anti-4-1BB-Fc hole chain allows generation of a heterodimer, which includes a FAP binding moiety and two 4-1BB binding Fabs (FIGS. 40C and 40D).

[0904] The Pro329Gly, Leu234Ala and Leu235Ala mutations have been introduced in the constant region of the knob and hole heavy chains to abrogate binding to Fcgamma receptors according to the method described in International Patent Appl. Publ. No. WO2012/130831A1.

[0905] The bispecific 2+1 anti-4-1BB anti-FAP huIgG1 P329GLALA antibodies were produced by co-transfecting HEK293-EBNA cells with the mammalian expression vectors using polyethylenimine. The cells were transfected with the corresponding expression vectors in a 1:1:1 ratio (“vector knob heavy chain”:“vector light chain”:“vector hole heavy chain”). The constructs were produced and purified as described for the bispecific bivalent anti-4-1BB and anti-FAP huIgG1 P329GLALA antibodies (see Example 9.1).

[0906] The base pair and amino acid sequences for 2+1 anti-4-1BB, anti-FAP constructs with a-FAP VH fused to knob and VL fused to hole chain can be found respectively in Table 63.

TABLE 63
cDNA and amino acid sequences of mature bispecific
2 + 1 anti-4-1BB, anti-FAP human IgG1 P329GLALA.
(Constructs with a-FAP VL fused to hole and VH fused to knob
chain, termed in Table 64 below hole-VL)

| SEQ ID | | |
|---|---|---|
| NO: | Description | Sequence |
| 291 | (25G7) VLCL-light | see Table 48 |
| | chain | |
| | (nucleotide sequence) | |
| 317 | (25G7) VHCH1 Fc knob | GAGGTGCAGCTGCTGGAATCTGGCGGCGGACTGGTG |
| | VH (4B9) (nucleotide | CAGCCTGGCGGATCTCTGAGACTGAGCTGTGCCGCC |
| | sequence, heavy chain 1) | AGCGGCTTCACCTTCAGCAGCTACGCCATGAGCTGG |
| | | GTGCGCCAGGCCCCTGGAAAAGGCCTGGAATGGGT |
| | | GTCCGCCATCTCTGGCAGCGGCGGCAGCACCTACTA |
| | | CGCCGATTCTGTGAAGGGCCGGTTCACCATCAGCCG |
| | | GGACAACAGCAAGAACACCCTGTACCTGCAGATGA |
| | | ACAGCCTGCGGGCCGAGGACACCGCCGTGTACTATT |
| | | GCGCCAGGGACGACCCCTGGCCCCCCTTTGATTATT |
| | | GGGGACAGGGCACCCTCGTGACCGTGTCCAGCGCTA |
| | | GCACCAAGGGCCCATCGGTCTTCCCCCTGGCACCCT |
| | | CCTCCAAGAGCACCTCTGGGGGCACAGCGGCCCTGG |
| | | GCTGCCTGGTCAAGGACTACTTCCCCGAACCGGTGA |
| | | CGGTGTCGTGGAACTCAGGCGCCCTGACCAGCGGCG |
| | | TGCACACCTTCCCGGCTGTCCTACAGTCCTCAGGACT |
| | | CTACTCCCTCAGCAGCGTGGTGACCGTGCCCTCCAG |
| | | CAGCTTGGGCACCCAGACCTACATCTGCAACGTGAA |
| | | TCACAAGCCCAGCAACACCAAGGTGGACAAGAAAG |
| | | TTGAGCCCAAATCTTGTGACAAAACTCACACATGCC |
| | | CACCGTGCCCAGCACCTGAAGCTGCAGGGGGACCGT |
| | | CAGTCTTCCTCTTCCCCCCAAAACCCAAGGACACCC |
| | | TCATGATCTCCCGGACCCCTGAGGTCACATGCGTGG |
| | | TGGTGGACGTGAGCCACGAAGACCCTGAGGTCAAGT |
| | | TCAACTGGTACGTGGACGGCGTGGAGGTGCATAATG |
| | | CCAAGACAAAGCCGCGGGAGGAGCAGTACAACAGC |
| | | ACGTACCGTGTGGTCAGCGTCCTCACCGTCCTGCAC |
| | | CAGGACTGGCTGAATGGCAAGGAGTACAAGTGCAA |
| | | GGTCTCCAACAAAGCCCTCGGCGCCCCCATCGAGAA |
| | | AACCATCTCCAAAGCCAAAGGGCAGCCCCGAGAAC |
| | | CACAGGTGTACACCCTGCCCCCCTGCAGAGATGAGC |
| | | TGACCAAGAACCAGGTGTCCCTGTGGTGTCTGGTCA |
| | | AGGGCTTCTACCCCAGCGATATCGCCGTGGAGTGGG |
| | | AGAGCAACGGCCAGCCTGAGAACAACTACAAGACC |
| | | ACCCCCCCTGTGCTGGACAGCGACGGCAGCTTCTTC |
| | | CTGTACTCCAAACTGACCGTGGACAAGAGCCGGTGG |
| | | CAGCAGGGCAACGTGTTCAGCTGCAGCGTGATGCAC |
| | | GAGGCCCTGCACAACCACTACACCCAGAAGTCCCTG |
| | | AGCCTGAGCCCCGGCGGAGGCGGCGGAAGCGGAGG |
| | | AGGAGGATCTGGGGGCGGAGGTTCCGGAGGCGGTG |
| | | GATCTGAGGTGCAGCTGCTCGAAAGCGGCGGAGGA |
| | | CTGGTGCAGCCTGGCGGCAGCCTGAGACTGTCTTGC |
| | | GCCGCCAGCGGCTTCACCTTCAGCAGCTACGCCATG |
| | | AGCTGGGTCCGCCAGGCCCCTGGCAAGGGACTGGA |
| | | ATGGGTGTCCGCCATCATCGGCTCTGGCGCCAGCAC |
| | | CTACTACGCCGACAGCGTGAAGGGCCGGTTCACCAT |
| | | CAGCCGGGACAACAGCAAGAACACCCTGTACCTGC |
| | | AGATGAACAGCCTGCGGGCCGAGGACACCGCCGTG |
| | | TACTACTGCGCCAAGGGATGGTTCGGCGGCTTCAAC |
| | | TACTGGGGACAGGGCACCCTGGTCACCGTGTCCAGC |
| 318 | (25G7) VHCH1 Fc hole | GAGGTGCAGCTGCTGGAATCTGGCGGCGGACTGGTG |
| | VL (4B9) (nucleotide | CAGCCTGGCGGATCTCTGAGACTGAGCTGTGCCGCC |
| | sequence, heavy chain 2) | AGCGGCTTCACCTTCAGCAGCTACGCCATGAGCTGG |
| | | GTGCGCCAGGCCCCTGGAAAAGGCCTGGAATGGGT |
| | | GTCCGCCATCTCTGGCAGCGGCGGCAGCACCTACTA |
| | | CGCCGATTCTGTGAAGGGCCGGTTCACCATCAGCCG |
| | | GGACAACAGCAAGAACACCCTGTACCTGCAGATGA |
| | | ACAGCCTGCGGGCCGAGGACACCGCCGTGTACTATT |
| | | GCGCCAGGGACGACCCCTGGCCCCCCTTTGATTATT |
| | | GGGGACAGGGCACCCTCGTGACCGTGTCCAGCGCTA |
| | | GCACCAAGGGCCCATCGGTCTTCCCCCTGGCACCCT |
| | | CCTCCAAGAGCACCTCTGGGGGCACAGCGGCCCTGG |
| | | GCTGCCTGGTCAAGGACTACTTCCCCGAACCGGTGA |
| | | CGGTGTCGTGGAACTCAGGCGCCCTGACCAGCGGCG |
| | | TGCACACCTTCCCGGCTGTCCTACAGTCCTCAGGACT |
| | | CTACTCCCTCAGCAGCGTGGTGACCGTGCCCTCCAG |
| | | CAGCTTGGGCACCCAGACCTACATCTGCAACGTGAA |
| | | TCACAAGCCCAGCAACACCAAGGTGGACAAGAAAG |
| | | TTGAGCCCAAATCTTGTGACAAAACTCACACATGCC |
| | | CACCGTGCCCAGCACCTGAAGCTGCAGGGGGACCGT |
| | | CAGTCTTCCTCTTCCCCCCAAAACCCAAGGACACCC |
| | | TCATGATCTCCCGGACCCCTGAGGTCACATGCGTGG |
| | | TGGTGGACGTGAGCCACGAAGACCCTGAGGTCAAGT |
| | | TCAACTGGTACGTGGACGGCGTGGAGGTGCATAATG |
| | | CCAAGACAAAGCCGCGGGAGGAGCAGTACAACAGC |
| | | ACGTACCGTGTGGTCAGCGTCCTCACCGTCCTGCAC |
| | | CAGGACTGGCTGAATGGCAAGGAGTACAAGTGCAA |
| | | GGTCTCCAACAAAGCCCTCGGCGCCCCCATCGAGAA |
| | | AACCATCTCCAAAGCCAAAGGGCAGCCCCGAGAAC |
| | | CACAGGTGTGCACCCTGCCCCCATCCCGGGATGAGC |
| | | TGACCAAGAACCAGGTCAGCCTCTCGTGCGCAGTCA |
| | | AAGGCTTCTATCCCAGCGACATCGCCGTGGAGTGGG |
| | | AGAGCAATGGGCAGCCGGAGAACAACTACAAGACC |
| | | ACGCCTCCCGTGCTGGACTCCGACGGCTCCTTCTTCC |
| | | TCGTGAGCAAGCTCACCGTGGACAAGAGCAGGTGG |
| | | CAGCAGGGGAACGTCTTCTCATGCTCCGTGATGCAT |
| | | GAGGCTCTGCACAACCACTACACGCAGAAGAGCCTC |
| | | TCCCTGTCTCCGGGTGGAGGCGGCGGAAGCGGAGG |
| | | AGGAGGATCCGGCGGCGGAGGTTCCGGAGGCGGAG |
| | | GATCCGAGATCGTGCTGACCCAGTCTCCCGGCACCC |
| | | TGTCTCTGAGCCCTGGCGAGAGAGCCACCCTGTCCT |
| | | GCAGAGCCTCCCAGTCCGTGACCTCCTCCTACCTCG |
| | | CCTGGTATCAGCAGAAGCCCGGCCAGGCCCCTCGGC |
| | | TGCTGATCAACGTGGGCAGTCGGAGAGCCACCGGCA |
| | | TCCCTGACCGGTTCTCCGGCTCTGGCTCCGGCACCG |
| | | ACTTCACCCTGACCATCTCCCGGCTGGAACCCGAGG |
| | | ACTTCGCCGTGTACTACTGCCAGCAGGGCATCATGC |
| | | TGCCCCCCACCTTTGGCCAGGGCACCAAGGTGGAAA |
| | | TCAAG |
| 293 | (25G7) VLCL-light | see Table 48 |
| | chain | |
| 319 | (25G7) VHCH1 Fc knob | EVQLLESGGGLVQPGGSLRLSCAASGFTFSSYAMSWV |
| | VH (4B9) (heavy chain | RQAPGKGLEWVSAISGSGGSTYYADSVKGRFTISRDNS |
| | 1) | KNTLYLQMNSLRAEDTAVYYCARDDPWPPFDYWGQ |
| | | GTLVTVSSASTKGPSVFPLAPSSKSTSGGTAALGCLVK |
| | | DYFPEPVTVSWNSGALTSGVHTFPAVLQSSGLYSLSSV |
| | | VTVPSSSLGTQTYICNVNHKPSNTKVDKKVEPKSCDKT |
| | | HTCPPCPAPEAAGGPSVFLFPPKPKDTLMISRTPEVTCV |
| | | VVDVSHEDPEVKFNWYVDGVEVHNAKTKPREEQYNS |
| | | TYRVVSVLTVLHQDWLNGKEYKCKVSNKALGAPIEKT |
| | | ISKAKGQPREPQVYTLPPCRDELTKNQVSLWCLVKGF |
| | | YPSDIAVEWESNGQPENNYKTTPPVLDSDGSFFLYSKL |
| | | TVDKSRWQQGNVFSCSVMHEALHNHYTQKSLSLSPG |
| | | GGGGSGGGGSGGGGSGGGGSEVQLLESGGGLVQPGG |
| | | SLRLSCAASGFTFSSYAMSWVRQAPGKGLEWVSAIIGS |
| | | GASTYYADSVKGRFTISRDNSKNTLYLQMNSLRAEDT |
| | | AVYYCAKGWFGGFNYWGQGTLVTVSS |
| 320 | (25G7) VHCH1 Fc hole | EVQLLESGGGLVQPGGSLRLSCAASGFTFSSYAMSWV |
| | VL (4B9) | RQAPGKGLEWVSAISGSGGSTYYADSVKGRFTISRDNS |
| | (heavy chain 2) | KNTLYLQMNSLRAEDTAVYYCARDDPWPPFDYWGQ |
| | | GTLVTVSSASTKGPSVFPLAPSSKSTSGGTAALGCLVK |
| | | DYFPEPVTVSWNSGALTSGVHTFPAVLQSSGLYSLSSV |
| | | VTVPSSSLGTQTYICNVNHKPSNTKVDKKVEPKSCDKT |
| | | HTCPPCPAPEAAGGPSVFLFPPKPKDTLMISRTPEVTCV |
| | | VVDVSHEDPEVKFNWYVDGVEVHNAKTKPREEQYNS |
| | | TYRVVSVLTVLHQDWLNGKEYKCKVSNKALGAPIEKT |
| | | ISKAKGQPREPQVCTLPPSRDELTKNQVSLSCAVKGFY |
| | | PSDIAVEWESNGQPENNYKTTPPVLDSDGSFFLVSKLT |
| | | VDKSRWQQGNVFSCSVMHEALHNHYTQKSLSLSPGG |
| | | GGGSGGGGSGGGGSGGGGSEIVLTQSPGTLSLSPGERA |
| | | TLSCRASQSVTSSYLAWYQQKPGQAPRLLINVGSRRAT |
| | | GIPDRFSGSGSGTDFTLTISRLEPEDFAVYYCQQGIMLP |
| | | PTFGQGTKVEIK |
| 295 | (11D5) VLCL-light | GACATCCAGATGACCCAGTCTCCTTCCACCCTGTCTG |
| | chain | CATCTGTAGGAGACCGTGTCACCATCACTTGCCGTG |
| | (nucleotide sequence) | CCAGTCAGAGTATTAGTAGCTGGTTGGCCTGGTATC |
| | | AGCAGAAACCAGGGAAAGCCCCTAAGCTCCTGATCT |
| | | ATGATGCCTCCAGTTTGGAAAGTGGGGTCCCATCAC |
| | | GTTTCAGCGGCAGTGGATCCGGGACAGAATTCACTC |
| | | TCACCATCAGCAGCTTGCAGCCTGATGATTTTGCAA |
| | | CTTATTACTGCCAACAGCTTAATTCGTATCCTCAGAC |
| | | GTTTGGCCAGGGCACCAAAGTCGAGATCAAGCGTAC |
| | | GGTGGCTGCACCATCTGTCTTCATCTTCCCGCCATCT |
| | | GATGAGCAGTTGAAATCTGGAACTGCCTCTGTTGTG |
| | | TGCCTGCTGAATAACTTCTATCCCAGAGAGGCCAAA |
| | | GTACAGTGGAAGGTGGATAACGCCCTCCAATCGGGT |
| | | AACTCCCAGGAGAGTGTCACAGAGCAGGACAGCAA |
| | | GGACAGCACCTACAGCCTCAGCAGCACCCTGACGCT |
| | | GAGCAAAGCAGACTACGAGAAACACAAAGTCTACG |
| | | CCTGCGAAGTCACCCATCAGGGCCTGAGCTCGCCCG |
| | | TCACAAAGAGCTTCAACAGGGGAGAGTGT |
| 321 | (11D5) VHCH1 Fc knob | CAGGTGCAGCTGGTGCAGTCTGGCGCCGAAGTGAAG |
| | VH (4B9) (nucleotide | AAACCCGGCAGCAGCGTGAAGGTGTCCTGCAAGGCT |
| | sequence, heavy chain 1) | TCCGGCGGCACCTTCAGCAGCTACGCCATTTCTTGG |
| | | GTGCGCCAGGCCCCTGGACAGGGCCTGGAATGGATG |
| | | GGCGGCATCATCCCCATCTTCGGCACCGCCAACTAC |
| | | GCCCAGAAATTCCAGGGCAGAGTGACCATCACCGCC |
| | | GACAAGAGCACCAGCACCGCCTACATGGAACTGAG |
| | | CAGCCTGCGGAGCGAGGACACCGCCGTGTACTACTG |
| | | TGCCAGAAGCACCCTGATCTACGGCTACTTCGACTA |
| | | CTGGGGCCAGGGCACCACCGTGACCGTGTCTAGCGC |
| | | TAGCACCAAGGGCCCATCGGTCTTCCCCCTGGCACC |
| | | CTCCTCCAAGAGCACCTCTGGGGGCACAGCGGCCCT |
| | | GGGCTGCCTGGTCAAGGACTACTTCCCCGAACCGGT |
| | | GACGGTGTCGTGGAACTCAGGCGCCCTGACCAGCGG |
| | | CGTGCACACCTTCCCGGCTGTCCTACAGTCCTCAGG |
| | | ACTCTACTCCCTCAGCAGCGTGGTGACCGTGCCCTC |
| | | CAGCAGCTTGGGCACCCAGACCTACATCTGCAACGT |
| | | GAATCACAAGCCCAGCAACACCAAGGTGGACAAGA |
| | | AAGTTGAGCCCAAATCTTGTGACAAAACTCACACAT |
| | | GCCCACCGTGCCCAGCACCTGAAGCTGCAGGGGGAC |
| | | CGTCAGTCTTCCTCTTCCCCCCAAAACCCAAGGACA |
| | | CCCTCATGATCTCCCGGACCCCTGAGGTCACATGCG |
| | | TGGTGGTGGACGTGAGCCACGAAGACCCTGAGGTCA |
| | | AGTTCAACTGGTACGTGGACGGCGTGGAGGTGCATA |
| | | ATGCCAAGACAAAGCCGCGGGAGGAGCAGTACAAC |
| | | AGCACGTACCGTGTGGTCAGCGTCCTCACCGTCCTG |
| | | CACCAGGACTGGCTGAATGGCAAGGAGTACAAGTG |
| | | CAAGGTCTCCAACAAAGCCCTCGGCGCCCCCATCGA |
| | | GAAAACCATCTCCAAAGCCAAAGGGCAGCCCCGAG |
| | | AACCACAGGTGTACACCCTGCCCCCCTGCAGAGATG |
| | | AGCTGACCAAGAACCAGGTGTCCCTGTGGTGTCTGG |
| | | TCAAGGGCTTCTACCCCAGCGATATCGCCGTGGAGT |
| | | GGGAGAGCAACGGCCAGCCTGAGAACAACTACAAG |
| | | ACCACCCCCCCTGTGCTGGACAGCGACGGCAGCTTC |
| | | TTCCTGTACTCCAAACTGACCGTGGACAAGAGCCGG |
| | | TGGCAGCAGGGCAACGTGTTCAGCTGCAGCGTGATG |
| | | CACGAGGCCCTGCACAACCACTACACCCAGAAGTCC |
| | | CTGAGCCTGAGCCCCGGCGGAGGCGGCGGAAGCGG |
| | | AGGAGGAGGATCTGGGGGCGGAGGTTCCGGAGGCG |
| | | GTGGATCTGAGGTGCAGCTGCTCGAAAGCGGCGGA |
| | | GGACTGGTGCAGCCTGGCGGCAGCCTGAGACTGTCT |
| | | TGCGCCGCCAGCGGCTTCACCTTCAGCAGCTACGCC |
| | | ATGAGCTGGGTCCGCCAGGCCCCTGGCAAGGGACTG |
| | | GAATGGGTGTCCGCCATCATCGGCTCTGGCGCCAGC |
| | | ACCTACTACGCCGACAGCGTGAAGGGCCGGTTCACC |
| | | ATCAGCCGGGACAACAGCAAGAACACCCTGTACCTG |
| | | CAGATGAACAGCCTGCGGGCCGAGGACACCGCCGT |
| | | GTACTACTGCGCCAAGGGATGGTTCGGCGGCTTCAA |
| | | CTACTGGGGACAGGGCACCCTGGTCACCGTGTCCAGC |
| 322 | (11D5) VHCH1 Fc hole | CAGGTGCAGCTGGTGCAGTCTGGCGCCGAAGTGAAG |
| | VL (4B9) | AAACCCGGCAGCAGCGTGAAGGTGTCCTGCAAGGCT |
| | (nucleotide sequence, | TCCGGCGGCACCTTCAGCAGCTACGCCATTTCTTGG |
| | heavy chain 2) | GTGCGCCAGGCCCCTGGACAGGGCCTGGAATGGATG |
| | | GGCGGCATCATCCCCATCTTCGGCACCGCCAACTAC |
| | | GCCCAGAAATTCCAGGGCAGAGTGACCATCACCGCC |
| | | GACAAGAGCACCAGCACCGCCTACATGGAACTGAG |
| | | CAGCCTGCGGAGCGAGGACACCGCCGTGTACTACTG |
| | | TGCCAGAAGCACCCTGATCTACGGCTACTTCGACTA |
| | | CTGGGGCCAGGGCACCACCGTGACCGTGTCTAGCGC |
| | | TAGCACCAAGGGCCCATCGGTCTTCCCCCTGGCACC |
| | | CTCCTCCAAGAGCACCTCTGGGGGCACAGCGGCCCT |
| | | GGGCTGCCTGGTCAAGGACTACTTCCCCGAACCGGT |
| | | GACGGTGTCGTGGAACTCAGGCGCCCTGACCAGCGG |
| | | CGTGCACACCTTCCCGGCTGTCCTACAGTCCTCAGG |
| | | ACTCTACTCCCTCAGCAGCGTGGTGACCGTGCCCTC |
| | | CAGCAGCTTGGGCACCCAGACCTACATCTGCAACGT |
| | | GAATCACAAGCCCAGCAACACCAAGGTGGACAAGA |
| | | AAGTTGAGCCCAAATCTTGTGACAAAACTCACACAT |
| | | GCCCACCGTGCCCAGCACCTGAAGCTGCAGGGGGAC |
| | | CGTCAGTCTTCCTCTTCCCCCCAAAACCCAAGGACA |
| | | CCCTCATGATCTCCCGGACCCCTGAGGTCACATGCG |
| | | TGGTGGTGGACGTGAGCCACGAAGACCCTGAGGTCA |
| | | AGTTCAACTGGTACGTGGACGGCGTGGAGGTGCATA |
| | | ATGCCAAGACAAAGCCGCGGGAGGAGCAGTACAAC |
| | | AGCACGTACCGTGTGGTCAGCGTCCTCACCGTCCTG |
| | | CACCAGGACTGGCTGAATGGCAAGGAGTACAAGTG |
| | | CAAGGTCTCCAACAAAGCCCTCGGCGCCCCCATCGA |
| | | GAAAACCATCTCCAAAGCCAAAGGGCAGCCCCGAG |
| | | AACCACAGGTGTGCACCCTGCCCCCATCCCGGGATG |
| | | AGCTGACCAAGAACCAGGTCAGCCTCTCGTGCGCAG |
| | | TCAAAGGCTTCTATCCCAGCGACATCGCCGTGGAGT |
| | | GGGAGAGCAATGGGCAGCCGGAGAACAACTACAAG |
| | | ACCACGCCTCCCGTGCTGGACTCCGACGGCTCCTTCT |
| | | TCCTCGTGAGCAAGCTCACCGTGGACAAGAGCAGGT |
| | | GGCAGCAGGGGAACGTCTTCTCATGCTCCGTGATGC |
| | | ATGAGGCTCTGCACAACCACTACACGCAGAAGAGCC |
| | | TCTCCCTGTCTCCGGGTGGAGGCGGCGGAAGCGGAG |
| | | GAGGAGGATCCGGCGGCGGAGGTTCCGGAGGCGGA |
| | | GGATCCGAGATCGTGCTGACCCAGTCTCCCGGCACC |
| | | CTGTCTCTGAGCCCTGGCGAGAGAGCCACCCTGTCC |
| | | TGCAGAGCCTCCCAGTCCGTGACCTCCTCCTACCTCG |
| | | CCTGGTATCAGCAGAAGCCCGGCCAGGCCCCTCGGC |
| | | TGCTGATCAACGTGGGCAGTCGGAGAGCCACCGGCA |
| | | TCCCTGACCGGTTCTCCGGCTCTGGCTCCGGCACCG |
| | | ACTTCACCCTGACCATCTCCCGGCTGGAACCCGAGG |
| | | ACTTCGCCGTGTACTACTGCCAGCAGGGCATCATGC |
| | | TGCCCCCCACCTTTGGCCAGGGCACCAAGGTGGAAA |
| | | TCAAG |
| 297 | (11D5) VLCL-light | DIQMTQSPSTLSASVGDRVTITCRASQSISSWLAWYQQ |
| | chain | KPGKAPKLLIYDASSLESGVPSRFSGSGSGTEFTLTISSL |
| | | QPDDFATYYCQQLNSYPQTFGQGTKVEIKRTVAAPSV |
| | | FIFPPSDEQLKSGTASVVCLLNNFYPREAKVQWKVDN |
| | | ALQSGNSQESVTEQDSKDSTYSLSSTLTLSKADYEKHK |
| | | VYACEVTHQGLSSPVTKSFNRGEC |
| 323 | (11D5) VHCH1 Fc knob | QVQLVQSGAEVKKPGSSVKVSCKASGGTFSSYAISWV |
| | VH (4B9) (heavy chain | RQAPGQGLEWMGGIIPIFGTANYAQKFQGRVTITADKS |
| | 1) | TSTAYMELSSLRSEDTAVYYCARSTLIYGYFDYWGQG |
| | | TTVTVSSASTKGPSVFPLAPSSKSTSGGTAALGCLVKD |
| | | YFPEPVTVSWNSGALTSGVHTFPAVLQSSGLYSLSSVV |
| | | TVPSSSLGTQTYICNVNHKPSNTKVDKKVEPKSCDKTH |
| | | TCPPCPAPEAAGGPSVFLFPPKPKDTLMISRTPEVTCVV |
| | | VDVSHEDPEVKFNWYVDGVEVHNAKTKPREEQYNST |
| | | YRVVSVLTVLHQDWLNGKEYKCKVSNKALGAPIEKTI |
| | | SKAKGQPREPQVYTLPPCRDELTKNQVSLWCLVKGFY |
| | | PSDIAVEWESNGQPENNYKTTPPVLDSDGSFFLYSKLT |
| | | VDKSRWQQGNVFSCSVMHEALHNHYTQKSLSLSPGG |
| | | GGGSGGGGSGGGGSGGGGSEVQLLESGGGLVQPGGSL |
| | | RLSCAASGFTFSSYAMSWVRQAPGKGLEWVSAIIGSG |
| | | ASTYYADSVKGRFTISRDNSKNTLYLQMNSLRAEDTA |
| | | VYYCAKGWFGGFNYWGQGTLVTVSS |
| 324 | (11D5) VHCH1 Fc hole | QVQLVQSGAEVKKPGSSVKVSCKASGGTFSSYAISWV |
| | VL (4B9) | RQAPGQGLEWMGGIIPIFGTANYAQKFQGRVTITADKS |
| | (heavy chain 2) | TSTAYMELSSLRSEDTAVYYCARSTLIYGYFDYWGQG |
| | | TTVTVSSASTKGPSVFPLAPSSKSTSGGTAALGCLVKD |
| | | YFPEPVTVSWNSGALTSGVHTFPAVLQSSGLYSLSSVV |
| | | TVPSSSLGTQTYICNVNHKPSNTKVDKKVEPKSCDKTH |
| | | TCPPCPAPEAAGGPSVFLFPPKPKDTLMISRTPEVTCVV |
| | | VDVSHEDPEVKFNWYVDGVEVHNAKTKPREEQYNST |
| | | YRVVSVLTVLHQDWLNGKEYKCKVSNKALGAPIEKTI |
| | | SKAKGQPREPQVCTLPPSRDELTKNQVSLSCAVKGFYP |
| | | SDIAVEWESNGQPENNYKTTPPVLDSDGSFFLVSKLTV |
| | | DKSRWQQGNVFSCSVMHEALHNHYTQKSLSLSPGGG |
| | | GGSGGGGSGGGGSGGGGSEIVLTQSPGTLSLSPGERAT |
| | | LSCRASQSVTSSYLAWYQQKPGQAPRLLINVGSRRAT |
| | | GIPDRFSGSGSGTDFTLTISRLEPEDFAVYYCQQGIMLP |
| | | PTFGQGTKVEIK |

TABLE 64
Biochemical analysis of bispecific constructs with
a bivalent binding to 4-1BB and a monovalent binding
to FAP (2 + 1 4-1BB/FAP human IgG1 P329GLALA)

| | Yield | Monomer | CE-SDS |
|---|---|---|---|
| Clone | [mg/l] | [%] | (nonred) |
| 2 + 1 25G7/FAP (hole-VH) | 25.6 | 96.7 | 95.4 |
| 2 + 1 11D5/FAP (hole-VH) | 6.3 | 97 | 89.2 |

### 9.4 Preparation, Purification and Characterization of FAP Antigens as Screening Tools

[0907] In order to test the binding to FAP, DNA sequences encoding the ectodomains of human, mouse or cynomolgus FAP fused to a C-terminal HisTag were cloned in an expression vector containing a chimeric MPSV promoter consisting of the MPSV core promoter combined with the CMV promoter enhancer fragment. The expression vector also contains the oriP region for episomal replication in EBNA (Epstein Barr Virus Nuclear Antigen) containing host cells. The amino acid and nucleotide sequences of a His-tagged human FAP ECD is shown in SEQ ID NOs 85 and 86, respectively. SEQ ID NOs 88 and 89 show the amino acid and nucleotide sequences, respectively, of a His-tagged mouse FAP ECD. SEQ ID NOs 90 and 91 show the amino acid and nucleotide sequences, respectively, of a His-tagged cynomolgus FAP ECD.

[0908] The FAP antigens were produced by co-transfecting HEK293-EBNA cells with the mammalian expression vectors using polyethylenimine (PEI; Polysciences Inc.).

[0909] For a 200 mL production in 500 mL shake flasks, 300 million HEK293 EBNA cells were seeded 24 hours before transfection in 100% F17+6 mM Glutamine. For transfection, 400 million cells were centrifuged for 5 minutes at 210×g, and supernatant was replaced by 20 mL pre-warmed CD-CHO medium (Gibco). Expression vectors were mixed in 20 mL CD-CHO medium to a final amount of 200 μg DNA. After addition of 540 μL PEI (1 mg/mL) (Polysciences Inc.), the solution was vortexed for 15 seconds and incubated for 10 minutes at room temperature. Afterwards, resuspended cells were mixed with the DNA/PEI solution, transferred to a 500 mL shake flask and incubated for 3 hours at 37° C. in an incubator with a 5% CO2 atmosphere and shaking at 165 rpm. After the incubation, 160 mL F17 medium and supplements (1 mM valproic acid, 5 g/l Pepsoy and 6 mM L-Glutamine) were added and cells cultivated for 24 hours. 24 h after transfection the cells were then supplement with an amino acid and glucose feed at 12% final volume (24 mL). After cultivation for 7 days, the cell supernatant was collected by centrifugation for 45 minutes at 2000-3000×g. The solution was sterile filtered (0.22 μm filter), supplemented with sodium azide to a final concentration of 0.01% (w/v), and kept at 4° C.

[0910] Purification of the antigens from cell culture supernatants was carried out in a two step purification with first an affinity chromatography step using either a 5 ml IMAC column (Roche) or a 5 ml NiNTA column (Qiagen) followed by a size exclusion chromatography using a HiLoad Superdex 200 column (GE Healthcare) equilibrated with 20 mM Histidine, 140 mM NaCl, pH6.0 or 2 mM MOPS 150 mM NaCl 0.02% NaN3 pH 7.3, respectively.

[0911] For affinity chromatography, using the IMAC column (Roche), equilibration was performed with 25 mM Tris-HCl, 500 mM sodium Chloride, 20 mM imidazole, pH8.0 for 8 CVs. The supernatant was loaded and unbound protein washed out by washing with 10 CVs of 25 mM Tris-HCl, 500 mM sodium Chloride, 20 mM imidazole, pH8.0. The bound protein was eluted using a linear gradient of 20 CVs (from 0-100%) of 25 mM Tris-HCl, 500 mM sodium Chloride, 500 mM imidazole, pH8.0 followed by a step at 100% for 8 CVs.

[0912] For the affinity chromatography using the NiNTA column (Qiagen), equilibration was performed with 50 mM Sodium Phosphate, 300 mM Sodium Chloride, pH8.0 for 8 CVs. The supernatant was loaded and unbound protein was removed by washing with 10 column volumes of 50 mM Sodium Phosphate, 300 mM Sodium Chloride, pH8.0. The bound protein was eluted using a linear gradient of 20 CVs (from 0 to 100%) of 50 mM Sodium Phosphate, 300 mM Sodium Chloride, 500 mM imidazole, pH7.4 followed by a step of 5CVs of 50 mM Sodium Phosphate, 300 mM Sodium Chloride, 500 mM imidazole, pH7.4. The column was then re-equilibrated with 8 CVs of 50 mM Sodium Phosphate, 300 mM Sodium Chloride, pH8.0.

[0913] The collected fractions were then supplemented with 1/10 (v/v) of 0.5 M EDTA, pH8.0. The protein was concentrated in Vivaspin columns (30 kD cut off, Sartorius) and filtered prior to loading on a HiLoad Superdex 200 column (GE Healthcare) equilibrated with 2 mM MOPS 150 mM NaCl 0.02% NaN₃ pH 7.3 or 20 mM Histidine, 140 mM NaCl, pH6.0.

[0914] The protein concentration of purified antigens was determined by measuring the OD at 280 nm, using the molar extinction coefficient calculated on the basis of the amino acid sequence. Purity and molecular weight of the antigens were analyzed by CE-SDS in the presence and absence of a reducing agent (Invitrogen) using a LabChipGXII (Caliper). The aggregate content of the antigens was analyzed using a TSKgel G3000 SW XL analytical size-exclusion column (Tosoh) equilibrated in a 25 mM potassium phosphate, 125 mM sodium chloride, 200 mM L-Arginine Monohydrocloride, 0.02% (w/v) NaN₃, pH 6.7 running buffer at 25° C.

### 9.5 Generation of Bispecific Tetravalent Antigen Binding Molecules Targeting 4-1BB and Fibroblast Activation Protein (FAP) (4+1 Format)

[0915] Bispecific agonistic 4-1BB antibodies with tetravalent binding for 4-1BB and monovalent binding for FAP, also termed 4+1 bispecific antigen binding molecules, were prepared as depicted in FIGS. 40E and 40F.

[0916] In this example the HCl of the construct was comprised of the following components, VHCH1_VHCH1 of an anti-4-1BB followed by Fc hole, at which C-terminus a VL or VH, respectively, of an anti-FAP binder (clone 4B9) was fused. HC2 was comprised of VHCH1_VHCH1 of anti-4-1BB followed by Fc knob, at which C-terminus a VH or VL, of the anti-FAP binder was fused.

[0917] Binders against 4-1BB, 12B3, 9B11, 11D5 and 25G7, were generated as described in Example 6. The generation and preparation of the FAP binders is described in WO 2012/020006 A2, which is incorporated herein by reference.

[0918] Combination of the targeted anti-FAP-Fc knob with the anti-4-1BB-Fc hole chain allows generation of a heterodimer, which includes a FAP binding moiety and four 4-1BB binding Fabs. The Pro329Gly, Leu234Ala and Leu235Ala mutations were introduced in the constant region of the heavy chains to abrogate binding to Fc gamma receptors according to the method described in International Patent Appl. Publ. No. WO 2012/130831 A1. The heavy chain fusion proteins were co-expressed with the light chain of the anti-4-1BB binder (CLVL). The resulting bispecific, tetravalent construct is depicted in FIGS. 40E and 40F and the nucleotide and amino acid sequences can be found in Table 65.

[0919] The bispecific 4+1 anti-4-1BB anti-FAP huIgG1 P329GLALA were produced by co-transfecting HEK293-EBNA cells with the mammalian expression vectors using polyethylenimine. The cells were transfected with the corresponding expression vectors in a 1:1:1 ratio (“vector knob heavy chain”:“vector light chain”:“vector hole heavy chain”). The 4+1 bispecific antigen binding molecules were produced and purified as described for the bispecific bivalent anti-4-1BB and anti-FAP huIgG1 P329GLALA (see Example 9.1).

[0920] In addition, an “untargeted” 4+1 construct was prepared, wherein the VH and VL domain of the anti-FAP binder were replaced by a germline control, termed DP47, not binding to the antigen.

TABLE 65
cDNA and amino acid sequences of mature bispecific
4 + 1 anti-4-1BB, anti-FAP human IgG1 P329GLALA
kih antibodies (constructs with a-FAP VH fused to knob
and VL fused to hole chain, termed below hole-VL)t

| SEQ ID | | |
|---|---|---|
| NO: | Description | Sequence |
| 287 | (12B3) VLCL-light | see Table 48 |
| | chain | |
| | (nucleotide sequence) | |
| 325 | HC 1 | CAGGTGCAGCTGGTGCAGTCTGGCGCCGAAGTGAAG |
| | (12B3) | AAACCCGGCAGCAGCGTGAAGGTGTCCTGCAAGGCT |
| | VHCH1_VHCH1 Fc | TCCGGCGGCACCTTCAGCAGCTACGCCATTTCTTGG |
| | knob VH (4B9) | GTGCGCCAGGCCCCTGGACAGGGCCTGGAATGGATG |
| | (nucleotide sequence) | GGCGGCATCATCCCCATCTTCGGCACCGCCAACTAC |
| | | GCCCAGAAATTCCAGGGCAGAGTGACCATCACCGCC |
| | | GACAAGAGCACCAGCACCGCCTACATGGAACTGAG |
| | | CAGCCTGCGGAGCGAGGACACCGCCGTGTACTACTG |
| | | TGCCAGAAGCGAGTTCCGGTTCTACGCCGACTTCGA |
| | | CTACTGGGGCCAGGGCACCACCGTGACCGTGTCTAG |
| | | CGCTTCTACCAAGGGCCCCAGCGTGTTCCCTCTGGC |
| | | CCCTAGCAGCAAGAGCACATCTGGCGGAACAGCCG |
| | | CCCTGGGCTGCCTCGTGAAGGACTACTTTCCCGAGC |
| | | CCGTGACAGTGTCCTGGAACTCTGGCGCCCTGACAA |
| | | GCGGCGTGCACACCTTTCCAGCCGTGCTGCAGAGCA |
| | | GCGGCCTGTACTCTCTGAGCAGCGTCGTGACTGTGC |
| | | CCAGCAGCAGCCTGGGAACCCAGACCTACATCTGCA |
| | | ACGTGAACCACAAGCCCAGCAACACCAAGGTGGAC |
| | | AAGAAGGTGGAACCCAAGAGCTGCGACGGCGGAGG |
| | | CGGATCTGGCGGCGGAGGATCCCAGGTGCAGCTGGT |
| | | GCAGAGCGGAGCTGAAGTGAAAAAGCCTGGCTCCT |
| | | CCGTGAAAGTGTCTTGTAAAGCCAGCGGCGGCACAT |
| | | TCTCATCCTACGCCATCAGCTGGGTGCGGCAGGCTC |
| | | CAGGCCAGGGACTGGAATGGATGGGAGGAATTATC |
| | | CCTATTTTTGGGACAGCCAATTATGCTCAGAAATTTC |
| | | AGGGGCGCGTGACAATTACAGCCGACAAGTCCACCT |
| | | CTACAGCTTATATGGAACTGTCCTCCCTGCGCTCCGA |
| | | GGATACAGCTGTGTATTACTGCGCTCGGAGCGAGTT |
| | | TAGATTCTATGCCGATTTTGATTATTGGGGGCAGGG |
| | | AACAACAGTGACTGTGTCCTCCGCTAGCACCAAGGG |
| | | CCCATCGGTCTTCCCCCTGGCACCCTCCTCCAAGAGC |
| | | ACCTCTGGGGGCACAGCGGCCCTGGGCTGCCTGGTC |
| | | AAGGACTACTTCCCCGAACCGGTGACGGTGTCGTGG |
| | | AACTCAGGCGCCCTGACCAGCGGCGTGCACACCTTC |
| | | CCGGCTGTCCTACAGTCCTCAGGACTCTACTCCCTCA |
| | | GCAGCGTGGTGACCGTGCCCTCCAGCAGCTTGGGCA |
| | | CCCAGACCTACATCTGCAACGTGAATCACAAGCCCA |
| | | GCAACACCAAGGTGGACAAGAAAGTTGAGCCCAAA |
| | | TCTTGTGACAAAACTCACACATGCCCACCGTGCCCA |
| | | GCACCTGAAGCTGCAGGGGGACCGTCAGTCTTCCTC |
| | | TTCCCCCCAAAACCCAAGGACACCCTCATGATCTCC |
| | | CGGACCCCTGAGGTCACATGCGTGGTGGTGGACGTG |
| | | AGCCACGAAGACCCTGAGGTCAAGTTCAACTGGTAC |
| | | GTGGACGGCGTGGAGGTGCATAATGCCAAGACAAA |
| | | GCCGCGGGAGGAGCAGTACAACAGCACGTACCGTG |
| | | TGGTCAGCGTCCTCACCGTCCTGCACCAGGACTGGC |
| | | TGAATGGCAAGGAGTACAAGTGCAAGGTCTCCAAC |
| | | AAAGCCCTCGGCGCCCCCATCGAGAAAACCATCTCC |
| | | AAAGCCAAAGGGCAGCCCCGAGAACCACAGGTGTA |
| | | CACCCTGCCCCCCTGCAGAGATGAGCTGACCAAGAA |
| | | CCAGGTGTCCCTGTGGTGTCTGGTCAAGGGCTTCTA |
| | | CCCCAGCGATATCGCCGTGGAGTGGGAGAGCAACG |
| | | GCCAGCCTGAGAACAACTACAAGACCACCCCCCCTG |
| | | TGCTGGACAGCGACGGCAGCTTCTTCCTGTACTCCA |
| | | AACTGACCGTGGACAAGAGCCGGTGGCAGCAGGGC |
| | | AACGTGTTCAGCTGCAGCGTGATGCACGAGGCCCTG |
| | | CACAACCACTACACCCAGAAGTCCCTGAGCCTGAGC |
| | | CCCGGCGGAGGCGGCGGAAGCGGAGGAGGAGGATC |
| | | TGGGGGCGGAGGTTCCGGAGGCGGAGGATCCGAGG |
| | | TGCAGCTGCTCGAAAGCGGCGGAGGACTGGTGCAG |
| | | CCTGGCGGCAGCCTGAGACTGTCTTGCGCCGCCAGC |
| | | GGCTTCACCTTCAGCAGCTACGCCATGAGCTGGGTC |
| | | CGCCAGGCCCCTGGCAAGGGACTGGAATGGGTGTCC |
| | | GCCATCATCGGCTCTGGCGCCAGCACCTACTACGCC |
| | | GACAGCGTGAAGGGCCGGTTCACCATCAGCCGGGA |
| | | CAACAGCAAGAACACCCTGTACCTGCAGATGAACA |
| | | GCCTGCGGGCCGAGGACACCGCCGTGTACTACTGCG |
| | | CCAAGGGATGGTTCGGCGGCTTCAACTACTGGGGAC |
| | | AGGGCACCCTGGTCACCGTGTCCAGC |
| 326 | HC 2 | CAGGTGCAGCTGGTGCAGTCTGGCGCCGAAGTGAAG |
| | (12B3) | AAACCCGGCAGCAGCGTGAAGGTGTCCTGCAAGGCT |
| | VHCH1_VHCH1 Fc | TCCGGCGGCACCTTCAGCAGCTACGCCATTTCTTGG |
| | hole VL (4B9) | GTGCGCCAGGCCCCTGGACAGGGCCTGGAATGGATG |
| | (nucleotide sequence) | GGCGGCATCATCCCCATCTTCGGCACCGCCAACTAC |
| | | GCCCAGAAATTCCAGGGCAGAGTGACCATCACCGCC |
| | | GACAAGAGCACCAGCACCGCCTACATGGAACTGAG |
| | | CAGCCTGCGGAGCGAGGACACCGCCGTGTACTACTG |
| | | TGCCAGAAGCGAGTTCCGGTTCTACGCCGACTTCGA |
| | | CTACTGGGGCCAGGGCACCACCGTGACCGTGTCTAG |
| | | CGCTTCTACCAAGGGCCCCAGCGTGTTCCCTCTGGC |
| | | CCCTAGCAGCAAGAGCACATCTGGCGGAACAGCCG |
| | | CCCTGGGCTGCCTCGTGAAGGACTACTTTCCCGAGC |
| | | CCGTGACAGTGTCCTGGAACTCTGGCGCCCTGACAA |
| | | GCGGCGTGCACACCTTTCCAGCCGTGCTGCAGAGCA |
| | | GCGGCCTGTACTCTCTGAGCAGCGTCGTGACTGTGC |
| | | CCAGCAGCAGCCTGGGAACCCAGACCTACATCTGCA |
| | | ACGTGAACCACAAGCCCAGCAACACCAAGGTGGAC |
| | | AAGAAGGTGGAACCCAAGAGCTGCGACGGCGGAGG |
| | | CGGATCTGGCGGCGGAGGATCCCAGGTGCAGCTGGT |
| | | GCAGAGCGGAGCTGAAGTGAAAAAGCCTGGCTCCT |
| | | CCGTGAAAGTGTCTTGTAAAGCCAGCGGCGGCACAT |
| | | TCTCATCCTACGCCATCAGCTGGGTGCGGCAGGCTC |
| | | CAGGCCAGGGACTGGAATGGATGGGAGGAATTATC |
| | | CCTATTTTTGGGACAGCCAATTATGCTCAGAAATTTC |
| | | AGGGGCGCGTGACAATTACAGCCGACAAGTCCACCT |
| | | CTACAGCTTATATGGAACTGTCCTCCCTGCGCTCCGA |
| | | GGATACAGCTGTGTATTACTGCGCTCGGAGCGAGTT |
| | | TAGATTCTATGCCGATTTTGATTATTGGGGGCAGGG |
| | | AACAACAGTGACTGTGTCCTCCGCTAGCACCAAGGG |
| | | CCCATCGGTCTTCCCCCTGGCACCCTCCTCCAAGAGC |
| | | ACCTCTGGGGGCACAGCGGCCCTGGGCTGCCTGGTC |
| | | AAGGACTACTTCCCCGAACCGGTGACGGTGTCGTGG |
| | | AACTCAGGCGCCCTGACCAGCGGCGTGCACACCTTC |
| | | CCGGCTGTCCTACAGTCCTCAGGACTCTACTCCCTCA |
| | | GCAGCGTGGTGACCGTGCCCTCCAGCAGCTTGGGCA |
| | | CCCAGACCTACATCTGCAACGTGAATCACAAGCCCA |
| | | GCAACACCAAGGTGGACAAGAAAGTTGAGCCCAAA |
| | | TCTTGTGACAAAACTCACACATGCCCACCGTGCCCA |
| | | GCACCTGAAGCTGCAGGGGGACCGTCAGTCTTCCTC |
| | | TTCCCCCCAAAACCCAAGGACACCCTCATGATCTCC |
| | | CGGACCCCTGAGGTCACATGCGTGGTGGTGGACGTG |
| | | AGCCACGAAGACCCTGAGGTCAAGTTCAACTGGTAC |
| | | GTGGACGGCGTGGAGGTGCATAATGCCAAGACAAA |
| | | GCCGCGGGAGGAGCAGTACAACAGCACGTACCGTG |
| | | TGGTCAGCGTCCTCACCGTCCTGCACCAGGACTGGC |
| | | TGAATGGCAAGGAGTACAAGTGCAAGGTCTCCAAC |
| | | AAAGCCCTCGGCGCCCCCATCGAGAAAACCATCTCC |
| | | AAAGCCAAAGGGCAGCCCCGAGAACCACAGGTGTG |
| | | CACCCTGCCCCCATCCCGGGATGAGCTGACCAAGAA |
| | | CCAGGTCAGCCTCTCGTGCGCAGTCAAAGGCTTCTA |
| | | TCCCAGCGACATCGCCGTGGAGTGGGAGAGCAATG |
| | | GGCAGCCGGAGAACAACTACAAGACCACGCCTCCC |
| | | GTGCTGGACTCCGACGGCTCCTTCTTCCTCGTGAGCA |
| | | AGCTCACCGTGGACAAGAGCAGGTGGCAGCAGGGG |
| | | AACGTCTTCTCATGCTCCGTGATGCATGAGGCTCTGC |
| | | ACAACCACTACACGCAGAAGAGCCTCTCCCTGTCTC |
| | | CGGGTGGAGGCGGCGGAAGCGGAGGAGGAGGATCC |
| | | GGCGGCGGAGGTTCCGGAGGCGGTGGATCTGAGAT |
| | | CGTGCTGACCCAGTCTCCCGGCACCCTGTCTCTGAG |
| | | CCCTGGCGAGAGAGCCACCCTGTCCTGCAGAGCCTC |
| | | CCAGTCCGTGACCTCCTCCTACCTCGCCTGGTATCAG |
| | | CAGAAGCCCGGCCAGGCCCCTCGGCTGCTGATCAAC |
| | | GTGGGCAGTCGGAGAGCCACCGGCATCCCTGACCGG |
| | | TTCTCCGGCTCTGGCTCCGGCACCGACTTCACCCTGA |
| | | CCATCTCCCGGCTGGAACCCGAGGACTTCGCCGTGT |
| | | ACTACTGCCAGCAGGGCATCATGCTGCCCCCCACCT |
| | | TTGGCCAGGGCACCAAGGTGGAAATCAAG |
| 289 | (12B3) VLCL-light | see Table 48 |
| | chain | |
| 327 | HC 1 | QVQLVQSGAEVKKPGSSVKVSCKASGGTFSSYAISWV |
| | (12B3) | RQAPGQGLEWMGGIIPIFGTANYAQKFQGRVTITADKS |
| | VHCH1_VHCH1 Fc | TSTAYMELSSLRSEDTAVYYCARSEFRFYADFDYWGQ |
| | knob VH (4B9) | GTTVTVSSASTKGPSVFPLAPSSKSTSGGTAALGCLVK |
| | | DYFPEPVTVSWNSGALTSGVHTFPAVLQSSGLYSLSSV |
| | | VTVPSSSLGTQTYICNVNHKPSNTKVDKKVEPKSCDG |
| | | GGGSGGGGSQVQLVQSGAEVKKPGSSVKVSCKASGG |
| | | TFSSYAISWVRQAPGQGLEWMGGIIPIFGTANYAQKFQ |
| | | GRVTITADKSTSTAYMELSSLRSEDTAVYYCARSEFRF |
| | | YADFDYWGQGTTVTVSSASTKGPSVFPLAPSSKSTSGG |
| | | TAALGCLVKDYFPEPVTVSWNSGALTSGVHTFPAVLQ |
| | | SSGLYSLSSVVTVPSSSLGTQTYICNVNHKPSNTKVDK |
| | | KVEPKSCDKTHTCPPCPAPEAAGGPSVFLFPPKPKDTL |
| | | MISRTPEVTCVVVDVSHEDPEVKFNWYVDGVEVHNA |
| | | KTKPREEQYNSTYRVVSVLTVLHQDWLNGKEYKCKV |
| | | SNKALGAPIEKTISKAKGQPREPQVYTLPPCRDELTKN |
| | | QVSLWCLVKGFYPSDIAVEWESNGQPENNYKTTPPVL |
| | | DSDGSFFLYSKLTVDKSRWQQGNVFSCSVMHEALHN |
| | | HYTQKSLSLSPGGGGGSGGGGSGGGGSGGGGSEVQLL |
| | | ESGGGLVQPGGSLRLSCAASGFTFSSYAMSWVRQAPG |
| | | KGLEWVSAIIGSGASTYYADSVKGRFTISRDNSKNTLY |
| | | LQMNSLRAEDTAVYYCAKGWFGGFNYWGQGTLVTV |
| | | SS |
| 328 | HC 2 | QVQLVQSGAEVKKPGSSVKVSCKASGGTFSSYAISWV |
| | (12B3) | RQAPGQGLEWMGGIIPIFGTANYAQKFQGRVTITADKS |
| | VHCH1_VHCH1 Fc | TSTAYMELSSLRSEDTAVYYCARSEFRFYADFDYWGQ |
| | hole VL (4B9) | GTTVTVSSASTKGPSVFPLAPSSKSTSGGTAALGCLVK |
| | | DYFPEPVTVSWNSGALTSGVHTFPAVLQSSGLYSLSSV |
| | | VTVPSSSLGTQTYICNVNHKPSNTKVDKKVEPKSCDG |
| | | GGGSGGGGSQVQLVQSGAEVKKPGSSVKVSCKASGG |
| | | TFSSYAISWVRQAPGQGLEWMGGIIPIFGTANYAQKFQ |
| | | GRVTITADKSTSTAYMELSSLRSEDTAVYYCARSEFRF |
| | | YADFDYWGQGTTVTVSSASTKGPSVFPLAPSSKSTSGG |
| | | TAALGCLVKDYFPEPVTVSWNSGALTSGVHTFPAVLQ |
| | | SSGLYSLSSWTVPSSSLGTQTYICNVNHKPSNTKVDK |
| | | KVEPKSCDKTHTCPPCPAPEAAGGPSVFLFPPKPKDTL |
| | | MISRTPEVTCVVVDVSHEDPEVKFNWYVDGVEVHNA |
| | | KTKPREEQYNSTYRVVSVLTVLHQDWLNGKEYKCKV |
| | | SNKALGAPIEKTISKAKGQPREPQVCTLPPSRDELTKNQ |
| | | VSLSCAVKGFYPSDIAVEWESNGQPENNYKTTPPVLDS |
| | | DGSFFLVSKLTVDKSRWQQGNVFSCSVMHEALHNHY |
| | | TQKSLSLSPGGGGGSGGGGSGGGGSGGGGSEIVLTQSP |
| | | GTLSLSPGERATLSGRASQSVTSSYLAWYQQKPGQAPR |
| | | LLINVGSRRATGIPDRFSGSGSGTDFTLTISRLEPEDFAV |
| | | YYCQQGIMLPPTFGQGTKVEIK |
| 291 | (25G7) VLCL-light | see Table 48 |
| | chain | |
| | (nucleotide sequence) | |
| 329 | HC 1 | GAGGTGCAGCTGCTGGAATCTGGCGGCGGACTGGTG |
| | (25G7) | CAGCCTGGCGGATCTCTGAGACTGAGCTGTGCCGCC |
| | VHCH1_VHCH1 Fc | AGCGGCTTCACCTTCAGCAGCTACGCCATGAGCTGG |
| | knob VH (4B9) | GTGCGCCAGGCCCCTGGAAAAGGCCTGGAATGGGT |
| | (nucleotide sequence) | GTCCGCCATCTCTGGCAGCGGCGGCAGCACCTACTA |
| | | CGCCGATTCTGTGAAGGGCCGGTTCACCATCAGCCG |
| | | GGACAACAGCAAGAACACCCTGTACCTGCAGATGA |
| | | ACAGCCTGCGGGCCGAGGACACCGCCGTGTACTATT |
| | | GCGCCAGGGACGACCCCTGGCCCCCCTTTGATTATT |
| | | GGGGACAGGGCACCCTCGTGACCGTGTCCAGCGCTT |
| | | CTACCAAGGGCCCCAGCGTGTTCCCTCTGGCCCCTA |
| | | GCAGCAAGAGCACATCTGGCGGAACAGCCGCCCTG |
| | | GGCTGCCTCGTGAAGGACTACTTTCCCGAGCCCGTG |
| | | ACAGTGTCCTGGAACTCTGGCGCCCTGACAAGCGGC |
| | | GTGCACACCTTTCCAGCCGTGCTGCAGAGCAGCGGC |
| | | CTGTACTCTCTGAGCAGCGTCGTGACTGTGCCCAGC |
| | | AGCAGCCTGGGAACCCAGACCTACATCTGCAACGTG |
| | | AACCACAAGCCCAGCAACACCAAGGTGGACAAGAA |
| | | GGTGGAACCCAAGAGCTGCGACGGCGGAGGCGGAT |
| | | CTGGCGGCGGAGGATCCGAAGTGCAGCTGCTGGAA |
| | | AGTGGGGGAGGCCTGGTGCAGCCAGGGGGAAGCCT |
| | | GAGACTGTCTTGTGCCGCTTCCGGCTTTACCTTTAGC |
| | | TCTTACGCCATGTCTTGGGTGCGGCAGGCTCCAGGC |
| | | AAGGGACTGGAATGGGTGTCAGCTATCAGCGGCTCT |
| | | GGCGGCTCCACATATTACGCCGACAGCGTGAAGGGC |
| | | AGATTCACAATCTCCAGAGACAACTCCAAGAATACT |
| | | CTGTACCTGCAGATGAATTCCCTGCGCGCCGAAGAT |
| | | ACAGCTGTGTATTACTGTGCCCGCGACGATCCTTGG |
| | | CCCCCTTTCGACTACTGGGGGCAGGGAACACTCGTG |
| | | ACAGTGTCATCCGCTAGCACCAAGGGCCCATCGGTC |
| | | TTCCCCCTGGCACCCTCCTCCAAGAGCACCTCTGGG |
| | | GGCACAGCGGCCCTGGGCTGCCTGGTCAAGGACTAC |
| | | TTCCCCGAACCGGTGACGGTGTCGTGGAACTCAGGC |
| | | GCCCTGACCAGCGGCGTGCACACCTTCCCGGCTGTC |
| | | CTACAGTCCTCAGGACTCTACTCCCTCAGCAGCGTG |
| | | GTGACCGTGCCCTCCAGCAGCTTGGGCACCCAGACC |
| | | TACATCTGCAACGTGAATCACAAGCCCAGCAACACC |
| | | AAGGTGGACAAGAAAGTTGAGCCCAAATCTTGTGAC |
| | | AAAACTCACACATGCCCACCGTGCCCAGCACCTGAA |
| | | GCTGCAGGGGGACCGTCAGTCTTCCTCTTCCCCCCA |
| | | AAACCCAAGGACACCCTCATGATCTCCCGGACCCCT |
| | | GAGGTCACATGCGTGGTGGTGGACGTGAGCCACGA |
| | | AGACCCTGAGGTCAAGTTCAACTGGTACGTGGACGG |
| | | CGTGGAGGTGCATAATGCCAAGACAAAGCCGCGGG |
| | | AGGAGCAGTACAACAGCACGTACCGTGTGGTCAGC |
| | | GTCCTCACCGTCCTGCACCAGGACTGGCTGAATGGC |
| | | AAGGAGTACAAGTGCAAGGTCTCCAACAAAGCCCTC |
| | | GGCGCCCCCATCGAGAAAACCATCTCCAAAGCCAAA |
| | | GGGCAGCCCCGAGAACCACAGGTGTACACCCTGCCC |
| | | CCCTGCAGAGATGAGCTGACCAAGAACCAGGTGTCC |
| | | CTGTGGTGTCTGGTCAAGGGCTTCTACCCCAGCGAT |
| | | ATCGCCGTGGAGTGGGAGAGCAACGGCCAGCCTGA |
| | | GAACAACTACAAGACCACCCCCCCTGTGCTGGACAG |
| | | CGACGGCAGCTTCTTCCTGTACTCCAAACTGACCGT |
| | | GGACAAGAGCCGGTGGCAGCAGGGCAACGTGTTCA |
| | | GCTGCAGCGTGATGCACGAGGCCCTGCACAACCACT |
| | | ACACCCAGAAGTCCCTGAGCCTGAGCCCCGGCGGAG |
| | | GCGGCGGAAGCGGAGGAGGAGGATCTGGGGGCGGA |
| | | GGTTCCGGAGGCGGAGGATCCGAGGTGCAGCTGCTC |
| | | GAAAGCGGCGGAGGACTGGTGCAGCCTGGCGGCAG |
| | | CCTGAGACTGTCTTGCGCCGCCAGCGGCTTCACCTTC |
| | | AGCAGCTACGCCATGAGCTGGGTCCGCCAGGCCCCT |
| | | GGCAAGGGACTGGAATGGGTGTCCGCCATCATCGGC |
| | | TCTGGCGCCAGCACCTACTACGCCGACAGCGTGAAG |
| | | GGCCGGTTCACCATCAGCCGGGACAACAGCAAGAA |
| | | CACCCTGTACCTGCAGATGAACAGCCTGCGGGCCGA |
| | | GGACACCGCCGTGTACTACTGCGCCAAGGGATGGTT |
| | | CGGCGGCTTCAACTACTGGGGACAGGGCACCCTGGT |
| | | CACCGTGTCCAGC |
| 330 | HC 2 | GAGGTGCAGCTGCTGGAATCTGGCGGCGGACTGGTG |
| | (25G7) | CAGCCTGGCGGATCTCTGAGACTGAGCTGTGCCGCC |
| | VHCH1_VHCH1 Fc | AGCGGCTTCACCTTCAGCAGCTACGCCATGAGCTGG |
| | hole VL (4B9) | GTGCGCCAGGCCCCTGGAAAAGGCCTGGAATGGGT |
| | (nucleotide sequence) | GTCCGCCATCTCTGGCAGCGGCGGCAGCACCTACTA |
| | | CGCCGATTCTGTGAAGGGCCGGTTCACCATCAGCCG |
| | | GGACAACAGCAAGAACACCCTGTACCTGCAGATGA |
| | | ACAGCCTGCGGGCCGAGGACACCGCCGTGTACTATT |
| | | GCGCCAGGGACGACCCCTGGCCCCCCTTTGATTATT |
| | | GGGGACAGGGCACCCTCGTGACCGTGTCCAGCGCTT |
| | | CTACCAAGGGCCCCAGCGTGTTCCCTCTGGCCCCTA |
| | | GCAGCAAGAGCACATCTGGCGGAACAGCCGCCCTG |
| | | GGCTGCCTCGTGAAGGACTACTTTCCCGAGCCCGTG |
| | | ACAGTGTCCTGGAACTCTGGCGCCCTGACAAGCGGC |
| | | GTGCACACCTTTCCAGCCGTGCTGCAGAGCAGCGGC |
| | | CTGTACTCTCTGAGCAGCGTCGTGACTGTGCCCAGC |
| | | AGCAGCCTGGGAACCCAGACCTACATCTGCAACGTG |
| | | AACCACAAGCCCAGCAACACCAAGGTGGACAAGAA |
| | | GGTGGAACCCAAGAGCTGCGACGGCGGAGGCGGAT |
| | | CTGGCGGCGGAGGATCCGAAGTGCAGCTGCTGGAA |
| | | AGTGGGGGAGGCCTGGTGCAGCCAGGGGGAAGCCT |
| | | GAGACTGTCTTGTGCCGCTTCCGGCTTTACCTTTAGC |
| | | TCTTACGCCATGTCTTGGGTGCGGCAGGCTCCAGGC |
| | | AAGGGACTGGAATGGGTGTCAGCTATCAGCGGCTCT |
| | | GGCGGCTCCACATATTACGCCGACAGCGTGAAGGGC |
| | | AGATTCACAATCTCCAGAGACAACTCCAAGAATACT |
| | | CTGTACCTGCAGATGAATTCCCTGCGCGCCGAAGAT |
| | | ACAGCTGTGTATTACTGTGCCCGCGACGATCCTTGG |
| | | CCCCCTTTCGACTACTGGGGGCAGGGAACACTCGTG |
| | | ACAGTGTCATCCGCTAGCACCAAGGGCCCATCGGTC |
| | | TTCCCCCTGGCACCCTCCTCCAAGAGCACCTCTGGG |
| | | GGCACAGCGGCCCTGGGCTGCCTGGTCAAGGACTAC |
| | | TTCCCCGAACCGGTGACGGTGTCGTGGAACTCAGGC |
| | | GCCCTGACCAGCGGCGTGCACACCTTCCCGGCTGTC |
| | | CTACAGTCCTCAGGACTCTACTCCCTCAGCAGCGTG |
| | | GTGACCGTGCCCTCCAGCAGCTTGGGCACCCAGACC |
| | | TACATCTGCAACGTGAATCACAAGCCCAGCAACACC |
| | | AAGGTGGACAAGAAAGTTGAGCCCAAATCTTGTGAC |
| | | AAAACTCACACATGCCCACCGTGCCCAGCACCTGAA |
| | | GCTGCAGGGGGACCGTCAGTCTTCCTCTTCCCCCCA |
| | | AAACCCAAGGACACCCTCATGATCTCCCGGACCCCT |
| | | GAGGTCACATGCGTGGTGGTGGACGTGAGCCACGA |
| | | AGACCCTGAGGTCAAGTTCAACTGGTACGTGGACGG |
| | | CGTGGAGGTGCATAATGCCAAGACAAAGCCGCGGG |
| | | AGGAGCAGTACAACAGCACGTACCGTGTGGTCAGC |
| | | GTCCTCACCGTCCTGCACCAGGACTGGCTGAATGGC |
| | | AAGGAGTACAAGTGCAAGGTCTCCAACAAAGCCCTC |
| | | GGCGCCCCCATCGAGAAAACCATCTCCAAAGCCAAA |
| | | GGGCAGCCCCGAGAACCACAGGTGTGCACCCTGCCC |
| | | CCATCCCGGGATGAGCTGACCAAGAACCAGGTCAGC |
| | | CTCTCGTGCGCAGTCAAAGGCTTCTATCCCAGCGAC |
| | | ATCGCCGTGGAGTGGGAGAGCAATGGGCAGCCGGA |
| | | GAACAACTACAAGACCACGCCTCCCGTGCTGGACTC |
| | | CGACGGCTCCTTCTTCCTCGTGAGCAAGCTCACCGT |
| | | GGACAAGAGCAGGTGGCAGCAGGGGAACGTCTTCT |
| | | CATGCTCCGTGATGCATGAGGCTCTGCACAACCACT |
| | | ACACGCAGAAGAGCCTCTCCCTGTCTCCGGGTGGAG |
| | | GCGGCGGAAGCGGAGGAGGAGGATCCGGCGGCGGA |
| | | GGTTCCGGAGGCGGTGGATCTGAGATCGTGCTGACC |
| | | CAGTCTCCCGGCACCCTGTCTCTGAGCCCTGGCGAG |
| | | AGAGCCACCCTGTCCTGCAGAGCCTCCCAGTCCGTG |
| | | ACCTCCTCCTACCTCGCCTGGTATCAGCAGAAGCCC |
| | | GGCCAGGCCCCTCGGCTGCTGATCAACGTGGGCAGT |
| | | CGGAGAGCCACCGGCATCCCTGACCGGTTCTCCGGC |
| | | TCTGGCTCCGGCACCGACTTCACCCTGACCATCTCCC |
| | | GGCTGGAACCCGAGGACTTCGCCGTGTACTACTGCC |
| | | AGCAGGGCATCATGCTGCCCCCCACCTTTGGCCAGG |
| | | GCACCAAGGTGGAAATCAAG |
| 293 | (25G7) VLCL-light | see Table 48 |
| | chain | |
| 331 | HC 1 | EVQLLESGGGLVQPGGSLRLSCAASGFTFSSYAMSWV |
| | (25G7) | RQAPGKGLEWVSAISGSGGSTYYADSVKGRFTISRDNS |
| | VHCH1_VHCH1 Fc | KNTLYLQMNSLRAEDTAVYYCARDDPWPPFDYWGQ |
| | knob VH (4B9) | GTLVTVSSASTKGPSVFPLAPSSKSTSGGTAALGCLVK |
| | | DYFPEPVTVSWNSGALTSGVHTFPAVLQSSGLYSLSSV |
| | | VTVPSSSLGTQTYICNVNHKPSNTKVDKKVEPKSCDG |
| | | GGGSGGGGSEVQLLESGGGLVQPGGSLRLSCAASGFT |
| | | FSSYAMSWVRQAPGKGLEWVSAISGSGGSTYYADSVK |
| | | GRFTISRDNSKNTLYLQMNSLRAEDTAVYYCARDDPW |
| | | PPFDYWGQGTLVTVSSASTKGPSVFPLAPSSKSTSGGT |
| | | AALGCLVKDYFPEPVTVSWNSGALTSGVHTFPAVLQS |
| | | SGLYSLSSVVTVPSSSLGTQTYICNVNHKPSNTKVDKK |
| | | VEPKSCDKTHTCPPCPAPEAAGGPSVFLFPPKPKDTLMI |
| | | SRTPEVTCVVVDVSHEDPEVKFNWYVDGVEVHNAKT |
| | | KPREEQYNSTYRVVSVLTVLHQDWLNGKEYKCKVSN |
| | | KALGAPIEKTISKAKGQPREPQVYTLPPCRDELTKNQV |
| | | SLWCLVKGFYPSDIAVEWESNGQPENNYKTTPPVLDS |
| | | DGSFFLYSKLTVDKSRWQQGNVFSCSVMHEALHNHY |
| | | TQKSLSLSPGGGGGSGGGGSGGGGSGGGGSEVQLLES |
| | | GGGLVQPGGSLRLSCAASGFTFSSYAMSWVRQAPGKG |
| | | LEWVSAIIGSGASTYYADSVKGRFTISRDNSKNTLYLQ |
| | | MNSLRAEDTAVYYCAKGWFGGFNYWGQGTLVTVSS |
| 332 | HC 2 | EVQLLESGGGLVQPGGSLRLSCAASGFTFSSYAMSWV |
| | (25G7) | RQAPGKGLEWVSAISGSGGSTYYADSVKGRFTISRDNS |
| | VHCH1_VHCH1 Fc | KNTLYLQMNSLRAEDTAVYYCARDDPWPPFDYWGQ |
| | hole VL (4B9) | GTLVTVSSASTKGPSVFPLAPSSKSTSGGTAALGCLVK |
| | | DYFPEPVTVSWNSGALTSGVHTFPAVLQSSGLYSLSSV |
| | | VTVPSSSLGTQTYICNVNHKPSNTKVDKKVEPKSCDG |
| | | GGGSGGGGSEVQLLESGGGLVQPGGSLRLSCAASGFT |
| | | FSSYAMSWVRQAPGKGLEWVSAISGSGGSTYYADSVK |
| | | GRFTISRDNSKNTLYLQMNSLRAEDTAVYYCARDDPW |
| | | PPFDYWGQGTLVTVSSASTKGPSVFPLAPSSKSTSGGT |
| | | AALGCLVKDYFPEPVTVSWNSGALTSGVHTFPAVLQS |
| | | SGLYSLSSVVTVPSSSLGTQTYICNVNHKPSNTKVDKK |
| | | VEPKSCDKTHTCPPCPAPEAAGGPSVFLFPPKPKDTLMI |
| | | SRTPEVTCVVVDVSHEDPEVKFNWYVDGVEVHNAKT |
| | | KPREEQYNSTYRVVSVLTVLHQDWLNGKEYKCKVSN |
| | | KALGAPIEKTISKAKGQPREPQVCTLPPSRDELTKNQVS |
| | | LSCAVKGFYPSDIAVEWESNGQPENNYKTTPPVLDSD |
| | | GSFFLVSKLTVDKSRWQQGNVFSCSVMHEALHNHYT |
| | | QKSLSLSPGGGGGSGGGGSGGGGSGGGGSEIVLTQSPG |
| | | TLSLSPGERATLSCRASQSVTSSYLAWYQQKPGQAPRL |
| | | LINVGSRRATGIPDRFSGSGSGTDFTLTISRLEPEDFAVY |
| | | YCQQGIMLPPTFGQGTKVEIK |
| 295 | (11D5) VLCL-light | see Table 48 |
| | chain | |
| | (nucleotide sequence) | |
| 333 | HC 1 | CAGGTGCAGCTGGTGCAGTCTGGCGCCGAAGTGAAG |
| | (11D5) | AAACCCGGCAGCAGCGTGAAGGTGTCCTGCAAGGCT |
| | VHCH1_VHCH1 Fc | TCCGGCGGCACCTTCAGCAGCTACGCCATTTCTTGG |
| | knob VH (4B9) | GTGCGCCAGGCCCCTGGACAGGGCCTGGAATGGATG |
| | (nucleotide sequence) | GGCGGCATCATCCCCATCTTCGGCACCGCCAACTAC |
| | | GCCCAGAAATTCCAGGGCAGAGTGACCATCACCGCC |
| | | GACAAGAGCACCAGCACCGCCTACATGGAACTGAG |
| | | CAGCCTGCGGAGCGAGGACACCGCCGTGTACTACTG |
| | | TGCCAGAAGCACCCTGATCTACGGCTACTTCGACTA |
| | | CTGGGGCCAGGGCACCACCGTGACCGTGTCTAGCGC |
| | | TTCTACCAAGGGCCCCAGCGTGTTCCCTCTGGCCCCT |
| | | AGCAGCAAGAGCACATCTGGCGGAACAGCCGCCCT |
| | | GGGCTGCCTCGTGAAGGACTACTTTCCCGAGCCCGT |
| | | GACAGTGTCCTGGAACTCTGGCGCCCTGACAAGCGG |
| | | CGTGCACACCTTTCCAGCCGTGCTGCAGAGCAGCGG |
| | | CCTGTACTCTCTGAGCAGCGTCGTGACTGTGCCCAG |
| | | CAGCAGCCTGGGAACCCAGACCTACATCTGCAACGT |
| | | GAACCACAAGCCCAGCAACACCAAGGTGGACAAGA |
| | | AGGTGGAACCCAAGAGCTGCGACGGCGGAGGCGGA |
| | | TCTGGCGGCGGAGGATCCCAGGTGCAGCTGGTGCAG |
| | | AGCGGAGCTGAAGTGAAAAAGCCTGGCTCCTCCGTG |
| | | AAAGTGTCTTGTAAAGCCAGCGGCGGCACATTCTCA |
| | | TCCTACGCCATCAGCTGGGTGCGGCAGGCTCCAGGC |
| | | CAGGGACTGGAATGGATGGGAGGAATTATCCCTATT |
| | | TTTGGGACAGCCAATTATGCTCAGAAATTTCAGGGG |
| | | CGCGTGACAATTACAGCCGACAAGTCCACCTCTACA |
| | | GCTTATATGGAACTGTCCTCCCTGCGCTCCGAGGAT |
| | | ACAGCTGTGTATTACTGCGCCCGGTCCACACTGATC |
| | | TATGGATACTTTGATTATTGGGGGCAGGGAACAACA |
| | | GTGACTGTGTCCTCCGCTAGCACCAAGGGCCCATCG |
| | | GTCTTCCCCCTGGCACCCTCCTCCAAGAGCACCTCTG |
| | | GGGGCACAGCGGCCCTGGGCTGCCTGGTCAAGGACT |
| | | ACTTCCCCGAACCGGTGACGGTGTCGTGGAACTCAG |
| | | GCGCCCTGACCAGCGGCGTGCACACCTTCCCGGCTG |
| | | TCCTACAGTCCTCAGGACTCTACTCCCTCAGCAGCGT |
| | | GGTGACCGTGCCCTCCAGCAGCTTGGGCACCCAGAC |
| | | CTACATCTGCAACGTGAATCACAAGCCCAGCAACAC |
| | | CAAGGTGGACAAGAAAGTTGAGCCCAAATCTTGTGA |
| | | CAAAACTCACACATGCCCACCGTGCCCAGCACCTGA |
| | | AGCTGCAGGGGGACCGTCAGTCTTCCTCTTCCCCCC |
| | | AAAACCCAAGGACACCCTCATGATCTCCCGGACCCC |
| | | TGAGGTCACATGCGTGGTGGTGGACGTGAGCCACGA |
| | | AGACCCTGAGGTCAAGTTCAACTGGTACGTGGACGG |
| | | CGTGGAGGTGCATAATGCCAAGACAAAGCCGCGGG |
| | | AGGAGCAGTACAACAGCACGTACCGTGTGGTCAGC |
| | | GTCCTCACCGTCCTGCACCAGGACTGGCTGAATGGC |
| | | AAGGAGTACAAGTGCAAGGTCTCCAACAAAGCCCTC |
| | | GGCGCCCCCATCGAGAAAACCATCTCCAAAGCCAAA |
| | | GGGCAGCCCCGAGAACCACAGGTGTACACCCTGCCC |
| | | CCCTGCAGAGATGAGCTGACCAAGAACCAGGTGTCC |
| | | CTGTGGTGTCTGGTCAAGGGCTTCTACCCCAGCGAT |
| | | ATCGCCGTGGAGTGGGAGAGCAACGGCCAGCCTGA |
| | | GAACAACTACAAGACCACCCCCCCTGTGCTGGACAG |
| | | CGACGGCAGCTTCTTCCTGTACTCCAAACTGACCGT |
| | | GGACAAGAGCCGGTGGCAGCAGGGCAACGTGTTCA |
| | | GCTGCAGCGTGATGCACGAGGCCCTGCACAACCACT |
| | | ACACCCAGAAGTCCCTGAGCCTGAGCCCCGGCGGAG |
| | | GCGGCGGAAGCGGAGGAGGAGGATCTGGGGGCGGA |
| | | GGTTCCGGAGGCGGAGGATCCGAGGTGCAGCTGCTC |
| | | GAAAGCGGCGGAGGACTGGTGCAGCCTGGCGGCAG |
| | | CCTGAGACTGTCTTGCGCCGCCAGCGGCTTCACCTTC |
| | | AGCAGCTACGCCATGAGCTGGGTCCGCCAGGCCCCT |
| | | GGCAAGGGACTGGAATGGGTGTCCGCCATCATCGGC |
| | | TCTGGCGCCAGCACCTACTACGCCGACAGCGTGAAG |
| | | GGCCGGTTCACCATCAGCCGGGACAACAGCAAGAA |
| | | CACCCTGTACCTGCAGATGAACAGCCTGCGGGCCGA |
| | | GGACACCGCCGTGTACTACTGCGCCAAGGGATGGTT |
| | | CGGCGGCTTCAACTACTGGGGACAGGGCACCCTGGT |
| | | CACCGTGTCCAGC |
| 334 | HC 2 | CAGGTGCAGCTGGTGCAGTCTGGCGCCGAAGTGAAG |
| | (11D5) | AAACCCGGCAGCAGCGTGAAGGTGTCCTGCAAGGCT |
| | VHCH1_VHCH1 Fc | TCCGGCGGCACCTTCAGCAGCTACGCCATTTCTTGG |
| | hole VL (4B9) | GTGCGCCAGGCCCCTGGACAGGGCCTGGAATGGATG |
| | (nucleotide sequence) | GGCGGCATCATCCCCATCTTCGGCACCGCCAACTAC |
| | | GCCCAGAAATTCCAGGGCAGAGTGACCATCACCGCC |
| | | GACAAGAGCACCAGCACCGCCTACATGGAACTGAG |
| | | CAGCCTGCGGAGCGAGGACACCGCCGTGTACTACTG |
| | | TGCCAGAAGCACCCTGATCTACGGCTACTTCGACTA |
| | | CTGGGGCCAGGGCACCACCGTGACCGTGTCTAGCGC |
| | | TTCTACCAAGGGCCCCAGCGTGTTCCCTCTGGCCCCT |
| | | AGCAGCAAGAGCACATCTGGCGGAACAGCCGCCCT |
| | | GGGCTGCCTCGTGAAGGACTACTTTCCCGAGCCCGT |
| | | GACAGTGTCCTGGAACTCTGGCGCCCTGACAAGCGG |
| | | CGTGCACACCTTTCCAGCCGTGCTGCAGAGCAGCGG |
| | | CCTGTACTCTCTGAGCAGCGTCGTGACTGTGCCCAG |
| | | CAGCAGCCTGGGAACCCAGACCTACATCTGCAACGT |
| | | GAACCACAAGCCCAGCAACACCAAGGTGGACAAGA |
| | | AGGTGGAACCCAAGAGCTGCGACGGCGGAGGCGGA |
| | | TCTGGCGGCGGAGGATCCCAGGTGCAGCTGGTGCAG |
| | | AGCGGAGCTGAAGTGAAAAAGCCTGGCTCCTCCGTG |
| | | AAAGTGTCTTGTAAAGCCAGCGGCGGCACATTCTCA |
| | | TCCTACGCCATCAGCTGGGTGCGGCAGGCTCCAGGC |
| | | CAGGGACTGGAATGGATGGGAGGAATTATCCCTATT |
| | | TTTGGGACAGCCAATTATGCTCAGAAATTTCAGGGG |
| | | CGCGTGACAATTACAGCCGACAAGTCCACCTCTACA |
| | | GCTTATATGGAACTGTCCTCCCTGCGCTCCGAGGAT |
| | | ACAGCTGTGTATTACTGCGCCCGGTCCACACTGATC |
| | | TATGGATACTTTGATTATTGGGGGCAGGGAACAACA |
| | | GTGACTGTGTCCTCCGCTAGCACCAAGGGCCCATCG |
| | | GTCTTCCCCCTGGCACCCTCCTCCAAGAGCACCTCTG |
| | | GGGGCACAGCGGCCCTGGGCTGCCTGGTCAAGGACT |
| | | ACTTCCCCGAACCGGTGACGGTGTCGTGGAACTCAG |
| | | GCGCCCTGACCAGCGGCGTGCACACCTTCCCGGCTG |
| | | TCCTACAGTCCTCAGGACTCTACTCCCTCAGCAGCGT |
| | | GGTGACCGTGCCCTCCAGCAGCTTGGGCACCCAGAC |
| | | CTACATCTGCAACGTGAATCACAAGCCCAGCAACAC |
| | | CAAGGTGGACAAGAAAGTTGAGCCCAAATCTTGTGA |
| | | CAAAACTCACACATGCCCACCGTGCCCAGCACCTGA |
| | | AGCTGCAGGGGGACCGTCAGTCTTCCTCTTCCCCCC |
| | | AAAACCCAAGGACACCCTCATGATCTCCCGGACCCC |
| | | TGAGGTCACATGCGTGGTGGTGGACGTGAGCCACGA |
| | | AGACCCTGAGGTCAAGTTCAACTGGTACGTGGACGG |
| | | CGTGGAGGTGCATAATGCCAAGACAAAGCCGCGGG |
| | | AGGAGCAGTACAACAGCACGTACCGTGTGGTCAGC |
| | | GTCCTCACCGTCCTGCACCAGGACTGGCTGAATGGC |
| | | AAGGAGTACAAGTGCAAGGTCTCCAACAAAGCCCTC |
| | | GGCGCCCCCATCGAGAAAACCATCTCCAAAGCCAAA |
| | | GGGCAGCCCCGAGAACCACAGGTGTGCACCCTGCCC |
| | | CCATCCCGGGATGAGCTGACCAAGAACCAGGTCAGC |
| | | CTCTCGTGCGCAGTCAAAGGCTTCTATCCCAGCGAC |
| | | ATCGCCGTGGAGTGGGAGAGCAATGGGCAGCCGGA |
| | | GAACAACTACAAGACCACGCCTCCCGTGCTGGACTC |
| | | CGACGGCTCCTTCTTCCTCGTGAGCAAGCTCACCGT |
| | | GGACAAGAGCAGGTGGCAGCAGGGGAACGTCTTCT |
| | | CATGCTCCGTGATGCATGAGGCTCTGCACAACCACT |
| | | ACACGCAGAAGAGCCTCTCCCTGTCTCCGGGTGGAG |
| | | GCGGCGGAAGCGGAGGAGGAGGATCCGGCGGCGGA |
| | | GGTTCCGGAGGCGGTGGATCTGAGATCGTGCTGACC |
| | | CAGTCTCCCGGCACCCTGTCTCTGAGCCCTGGCGAG |
| | | AGAGCCACCCTGTCCTGCAGAGCCTCCCAGTCCGTG |
| | | ACCTCCTCCTACCTCGCCTGGTATCAGCAGAAGCCC |
| | | GGCCAGGCCCCTCGGCTGCTGATCAACGTGGGCAGT |
| | | CGGAGAGCCACCGGCATCCCTGACCGGTTCTCCGGC |
| | | TCTGGCTCCGGCACCGACTTCACCCTGACCATCTCCC |
| | | GGCTGGAACCCGAGGACTTCGCCGTGTACTACTGCC |
| | | AGCAGGGCATCATGCTGCCCCCCACCTTTGGCCAGG |
| | | GCACCAAGGTGGAAATCAAG |
| 297 | (11D5) VLCL-light | see Table 48 |
| | chain | |
| 335 | HC 1 | QVQLVQSGAEVKKPGSSVKVSCKASGGTFSSYAISWV |
| | (11D5) | RQAPGQGLEWMGGIIPIFGTANYAQKFQGRVTITADKS |
| | VHCH1_VHCH1 Fc | TSTAYMELSSLRSEDTAVYYCARSTLIYGYFDYWGQG |
| | knob VH (4B9) | TTVTVSSASTKGPSVFPLAPSSKSTSGGTAALGCLVKD |
| | | YFPEPVTVSWNSGALTSGVHTFPAVLQSSGLYSLSSVV |
| | | TVPSSSLGTQTYICNVNHKPSNTKVDKKVEPKSCDGG |
| | | GGSGGGGSQVQLVQSGAEVKKPGSSVKVSCKASGGTF |
| | | SSYAISWVRQAPGQGLEWMGGIIPIFGTANYAQKFQGR |
| | | VTITADKSTSTAYMELSSLRSEDTAVYYCARSTLIYGY |
| | | FDYWGQGTTVTVSSASTKGPSVFPLAPSSKSTSGGTAA |
| | | LGCLVKDYFPEPVTVSWNSGALTSGVHTFPAVLQSSG |
| | | LYSLSSVVTVPSSSLGTQTYICNVNHKPSNTKVDKKVE |
| | | PKSCDKTHTCPPCPAPEAAGGPSVFLFPPKPKDTLMISR |
| | | TPEVTCVVVDVSHEDPEVKFNWYVDGVEVHNAKTKP |
| | | REEQYNSTYRVVSVLTVLHQDWLNGKEYKCKVSNKA |
| | | LGAPIEKTISKAKGQPREPQVYTLPPCRDELTKNQVSL |
| | | WCLVKGFYPSDIAVEWESNGQPENNYKTTPPVLDSDG |
| | | SFFLYSKLTVDKSRWQQGNVFSCSVMHEALHNHYTQ |
| | | KSLSLSPGGGGGSGGGGSGGGGSGGGGSEVQLLESGG |
| | | GLVQPGGSLRLSCAASGFTFSSYAMSWVRQAPGKGLE |
| | | WVSAIIGSGASTYYADSVKGRFTISRDNSKNTLYLQMN |
| | | SLRAEDTAVYYCAKGWFGGFNYWGQGTLVTVSS |
| 336 | HC 2 | QVQLVQSGAEVKKPGSSVKVSCKASGGTFSSYAISWV |
| | (11D5) | RQAPGQGLEWMGGIIPIFGTANYAQKFQGRVTITADKS |
| | VHCH1_VHCH1 Fc | TSTAYMELSSLRSEDTAVYYCARSTLIYGYFDYWGQG |
| | hole VL (4B9) | TTVTVSSASTKGPSVFPLAPSSKSTSGGTAALGCLVKD |
| | | YFPEPVTVSWNSGALTSGVHTFPAVLQSSGLYSLSSVV |
| | | TVPSSSLGTQTYICNVNHKPSNTKVDKKVEPKSCDGG |
| | | GGSGGGGSQVQLVQSGAEVKKPGSSVKVSCKASGGTF |
| | | SSYAISWVRQAPGQGLEWMGGIIPIFGTANYAQKFQGR |
| | | VTITADKSTSTAYMELSSLRSEDTAVYYCARSTLIYGY |
| | | FDYWGQGTTVTVSSASTKGPSVFPLAPSSKSTSGGTAA |
| | | LGCLVKDYFPEPVTVSWNSGALTSGVHTFPAVLQSSG |
| | | LYSLSSVVTVPSSSLGTQTYICNVNHKPSNTKVDKKVE |
| | | PKSCDKTHTCPPCPAPEAAGGPSVFLFPPKPKDTLMISR |
| | | TPEVTCVVVDVSHEDPEVKFNWYVDGVEVHNAKTKP |
| | | REEQYNSTYRVVSVLTVLHQDWLNGKEYKCKVSNKA |
| | | LGAPIEKTISKAKGQPREPQVCTLPPSRDELTKNQVSLS |
| | | CAVKGFYPSDIAVEWESNGQPENNYKTTPPVLDSDGSF |
| | | FLVSKLTVDKSRWQQGNVFSCSVMHEALHNHYTQKS |
| | | LSLSPGGGGGSGGGGSGGGGSGGGGSEIVLTQSPGTLS |
| | | LSPGERATLSCRASQSVTSSYLAWYQQKPGQAPRLLIN |
| | | VGSRRATGIPDRFSGSGSGTDFTLTISRLEPEDFAVYYC |
| | | QQGIMLPPTFGQGTKVEIK |
| 299 | (9B11) VLCL-light | see Table 48 |
| | chain | |
| | (nucleotide sequence) | |
| 337 | HC 1 | CAGGTGCAATTGGTGCAGTCTGGGGCTGAGGTGAAG |
| | (9B11) | AAGCCTGGGTCCTCGGTGAAGGTCTCCTGCAAGGCC |
| | VHCH1_VHCH1 Fc | TCCGGAGGCACATTCAGCAGCTACGCTATAAGCTGG |
| | knob VH (4B9) | GTGCGACAGGCCCCTGGACAAGGGCTCGAGTGGAT |
| | (nucleotide sequence) | GGGAGGGATCATCCCTATCTTTGGTACAGCAAACTA |
| | | CGCACAGAAGTTCCAGGGCAGGGTCACCATTACTGC |
| | | AGACAAATCCACGAGCACAGCCTACATGGAGCTGA |
| | | GCAGCCTGAGATCTGAGGACACCGCCGTGTATTACT |
| | | GTGCGAGATCTTCTGGTGCTTACCCGGGTTACTTCGA |
| | | CTACTGGGGCCAAGGGACCACCGTGACCGTCTCCTC |
| | | AGCTTCTACCAAGGGCCCCAGCGTGTTCCCTCTGGC |
| | | CCCTAGCAGCAAGAGCACATCTGGCGGAACAGCCG |
| | | CCCTGGGCTGCCTCGTGAAGGACTACTTTCCCGAGC |
| | | CCGTGACAGTGTCCTGGAACTCTGGCGCCCTGACAA |
| | | GCGGCGTGCACACCTTTCCAGCCGTGCTGCAGAGCA |
| | | GCGGCCTGTACTCTCTGAGCAGCGTCGTGACTGTGC |
| | | CCAGCAGCAGCCTGGGAACCCAGACCTACATCTGCA |
| | | ACGTGAACCACAAGCCCAGCAACACCAAGGTGGAC |
| | | AAGAAGGTGGAACCCAAGAGCTGCGACGGCGGAGG |
| | | CGGATCTGGCGGCGGAGGATCCCAGGTGCAATTGGT |
| | | GCAGTCTGGGGCTGAGGTGAAGAAGCCTGGGTCCTC |
| | | GGTGAAGGTCTCCTGCAAGGCCTCCGGAGGCACATT |
| | | CAGCAGCTACGCTATAAGCTGGGTGCGACAGGCCCC |
| | | TGGACAAGGGCTCGAGTGGATGGGAGGGATCATCC |
| | | CTATCTTTGGTACAGCAAACTACGCACAGAAGTTCC |
| | | AGGGCAGGGTCACCATTACTGCAGACAAATCCACGA |
| | | GCACAGCCTACATGGAGCTGAGCAGCCTGAGATCTG |
| | | AGGACACCGCCGTGTATTACTGTGCGAGATCTTCTG |
| | | GTGCTTACCCGGGTTACTTCGACTACTGGGGCCAAG |
| | | GGACCACCGTGACCGTCTCCTCAGCTAGCACCAAGG |
| | | GCCCATCGGTCTTCCCCCTGGCACCCTCCTCCAAGA |
| | | GCACCTCTGGGGGCACAGCGGCCCTGGGCTGCCTGG |
| | | TCAAGGACTACTTCCCCGAACCGGTGACGGTGTCGT |
| | | GGAACTCAGGCGCCCTGACCAGCGGCGTGCACACCT |
| | | TCCCGGCTGTCCTACAGTCCTCAGGACTCTACTCCCT |
| | | CAGCAGCGTGGTGACCGTGCCCTCCAGCAGCTTGGG |
| | | CACCCAGACCTACATCTGCAACGTGAATCACAAGCC |
| | | CAGCAACACCAAGGTGGACAAGAAAGTTGAGCCCA |
| | | AATCTTGTGACAAAACTCACACATGCCCACCGTGCC |
| | | CAGCACCTGAAGCTGCAGGGGGACCGTCAGTCTTCC |
| | | TCTTCCCCCCAAAACCCAAGGACACCCTCATGATCT |
| | | CCCGGACCCCTGAGGTCACATGCGTGGTGGTGGACG |
| | | TGAGCCACGAAGACCCTGAGGTCAAGTTCAACTGGT |
| | | ACGTGGACGGCGTGGAGGTGCATAATGCCAAGACA |
| | | AAGCCGCGGGAGGAGCAGTACAACAGCACGTACCG |
| | | TGTGGTCAGCGTCCTCACCGTCCTGCACCAGGACTG |
| | | GCTGAATGGCAAGGAGTACAAGTGCAAGGTCTCCA |
| | | ACAAAGCCCTCGGCGCCCCCATCGAGAAAACCATCT |
| | | CCAAAGCCAAAGGGCAGCCCCGAGAACCACAGGTG |
| | | TACACCCTGCCCCCCTGCAGAGATGAGCTGACCAAG |
| | | AACCAGGTGTCCCTGTGGTGTCTGGTCAAGGGCTTC |
| | | TACCCCAGCGATATCGCCGTGGAGTGGGAGAGCAAC |
| | | GGCCAGCCTGAGAACAACTACAAGACCACCCCCCCT |
| | | GTGCTGGACAGCGACGGCAGCTTCTTCCTGTACTCC |
| | | AAACTGACCGTGGACAAGAGCCGGTGGCAGCAGGG |
| | | CAACGTGTTCAGCTGCAGCGTGATGCACGAGGCCCT |
| | | GCACAACCACTACACCCAGAAGTCCCTGAGCCTGAG |
| | | CCCCGGCGGAGGCGGCGGAAGCGGAGGAGGAGGAT |
| | | CTGGGGGCGGAGGTTCCGGAGGCGGAGGATCCGAG |
| | | GTGCAGCTGCTCGAAAGCGGCGGAGGACTGGTGCA |
| | | GCCTGGCGGCAGCCTGAGACTGTCTTGCGCCGCCAG |
| | | CGGCTTCACCTTCAGCAGCTACGCCATGAGCTGGGT |
| | | CCGCCAGGCCCCTGGCAAGGGACTGGAATGGGTGTC |
| | | CGCCATCATCGGCTCTGGCGCCAGCACCTACTACGC |
| | | CGACAGCGTGAAGGGCCGGTTCACCATCAGCCGGG |
| | | ACAACAGCAAGAACACCCTGTACCTGCAGATGAAC |
| | | AGCCTGCGGGCCGAGGACACCGCCGTGTACTACTGC |
| | | GCCAAGGGATGGTTCGGCGGCTTCAACTACTGGGGA |
| | | CAGGGCACCCTGGTCACCGTGTCCAGC |
| 338 | HC 2 | CAGGTGCAATTGGTGCAGTCTGGGGCTGAGGTGAAG |
| | (9B11) | AAGCCTGGGTCCTCGGTGAAGGTCTCCTGCAAGGCC |
| | VHCH1_VHCH1 Fc | TCCGGAGGCACATTCAGCAGCTACGCTATAAGCTGG |
| | hole VL (4B9) | GTGCGACAGGCCCCTGGACAAGGGCTCGAGTGGAT |
| | (nucleotide sequence) | GGGAGGGATCATCCCTATCTTTGGTACAGCAAACTA |
| | | CGCACAGAAGTTCCAGGGCAGGGTCACCATTACTGC |
| | | AGACAAATCCACGAGCACAGCCTACATGGAGCTGA |
| | | GCAGCCTGAGATCTGAGGACACCGCCGTGTATTACT |
| | | GTGCGAGATCTTCTGGTGCTTACCCGGGTTACTTCGA |
| | | CTACTGGGGCCAAGGGACCACCGTGACCGTCTCCTC |
| | | AGCTTCTACCAAGGGCCCCAGCGTGTTCCCTCTGGC |
| | | CCCTAGCAGCAAGAGCACATCTGGCGGAACAGCCG |
| | | CCCTGGGCTGCCTCGTGAAGGACTACTTTCCCGAGC |
| | | CCGTGACAGTGTCCTGGAACTCTGGCGCCCTGACAA |
| | | GCGGCGTGCACACCTTTCCAGCCGTGCTGCAGAGCA |
| | | GCGGCCTGTACTCTCTGAGCAGCGTCGTGACTGTGC |
| | | CCAGCAGCAGCCTGGGAACCCAGACCTACATCTGCA |
| | | ACGTGAACCACAAGCCCAGCAACACCAAGGTGGAC |
| | | AAGAAGGTGGAACCCAAGAGCTGCGACGGCGGAGG |
| | | CGGATCTGGCGGCGGAGGATCCCAGGTGCAATTGGT |
| | | GCAGTCTGGGGCTGAGGTGAAGAAGCCTGGGTCCTC |
| | | GGTGAAGGTCTCCTGCAAGGCCTCCGGAGGCACATT |
| | | CAGCAGCTACGCTATAAGCTGGGTGCGACAGGCCCC |
| | | TGGACAAGGGCTCGAGTGGATGGGAGGGATCATCC |
| | | CTATCTTTGGTACAGCAAACTACGCACAGAAGTTCC |
| | | AGGGCAGGGTCACCATTACTGCAGACAAATCCACGA |
| | | GCACAGCCTACATGGAGCTGAGCAGCCTGAGATCTG |
| | | AGGACACCGCCGTGTATTACTGTGCGAGATCTTCTG |
| | | GTGCTTACCCGGGTTACTTCGACTACTGGGGCCAAG |
| | | GGACCACCGTGACCGTCTCCTCAGCTAGCACCAAGG |
| | | GCCCATCGGTCTTCCCCCTGGCACCCTCCTCCAAGA |
| | | GCACCTCTGGGGGCACAGCGGCCCTGGGCTGCCTGG |
| | | TCAAGGACTACTTCCCCGAACCGGTGACGGTGTCGT |
| | | GGAACTCAGGCGCCCTGACCAGCGGCGTGCACACCT |
| | | TCCCGGCTGTCCTACAGTCCTCAGGACTCTACTCCCT |
| | | CAGCAGCGTGGTGACCGTGCCCTCCAGCAGCTTGGG |
| | | CACCCAGACCTACATCTGCAACGTGAATCACAAGCC |
| | | CAGCAACACCAAGGTGGACAAGAAAGTTGAGCCCA |
| | | AATCTTGTGACAAAACTCACACATGCCCACCGTGCC |
| | | CAGCACCTGAAGCTGCAGGGGGACCGTCAGTCTTCC |
| | | TCTTCCCCCCAAAACCCAAGGACACCCTCATGATCT |
| | | CCCGGACCCCTGAGGTCACATGCGTGGTGGTGGACG |
| | | TGAGCCACGAAGACCCTGAGGTCAAGTTCAACTGGT |
| | | ACGTGGACGGCGTGGAGGTGCATAATGCCAAGACA |
| | | AAGCCGCGGGAGGAGCAGTACAACAGCACGTACCG |
| | | TGTGGTCAGCGTCCTCACCGTCCTGCACCAGGACTG |
| | | GCTGAATGGCAAGGAGTACAAGTGCAAGGTCTCCA |
| | | ACAAAGCCCTCGGCGCCCCCATCGAGAAAACCATCT |
| | | CCAAAGCCAAAGGGCAGCCCCGAGAACCACAGGTG |
| | | TGCACCCTGCCCCCATCCCGGGATGAGCTGACCAAG |
| | | AACCAGGTCAGCCTCTCGTGCGCAGTCAAAGGCTTC |
| | | TATCCCAGCGACATCGCCGTGGAGTGGGAGAGCAAT |
| | | GGGCAGCCGGAGAACAACTACAAGACCACGCCTCC |
| | | CGTGCTGGACTCCGACGGCTCCTTCTTCCTCGTGAGC |
| | | AAGCTCACCGTGGACAAGAGCAGGTGGCAGCAGGG |
| | | GAACGTCTTCTCATGCTCCGTGATGCATGAGGCTCT |
| | | GCACAACCACTACACGCAGAAGAGCCTCTCCCTGTC |
| | | TCCGGGTGGAGGCGGCGGAAGCGGAGGAGGAGGAT |
| | | CCGGCGGCGGAGGTTCCGGAGGCGGTGGATCTGAG |
| | | ATCGTGCTGACCCAGTCTCCCGGCACCCTGTCTCTGA |
| | | GCCCTGGCGAGAGAGCCACCCTGTCCTGCAGAGCCT |
| | | CCCAGTCCGTGACCTCCTCCTACCTCGCCTGGTATCA |
| | | GCAGAAGCCCGGCCAGGCCCCTCGGCTGCTGATCAA |
| | | CGTGGGCAGTCGGAGAGCCACCGGCATCCCTGACCG |
| | | GTTCTCCGGCTCTGGCTCCGGCACCGACTTCACCCTG |
| | | ACCATCTCCCGGCTGGAACCCGAGGACTTCGCCGTG |
| | | TACTACTGCCAGCAGGGCATCATGCTGCCCCCCACC |
| | | TTTGGCCAGGGCACCAAGGTGGAAATCAAG |
| 301 | (9B11) VLCL-light | see Table 48 |
| | chain | |
| 339 | HC 1 | QVQLVQSGAEVKKPGSSVKVSCKASGGTFSSYAISWV |
| | (9B11) | RQAPGQGLEWMGGIIPIFGTANYAQKFQGRVTITADKS |
| | VHCH1_VHCH1 Fc | TSTAYMELSSLRSEDTAVYYCARSSGAYPGYFDYWGQ |
| | knob VH (4B9) | GTTVTVSSASTKGPSVFPLAPSSKSTSGGTAALGCLVK |
| | | DYFPEPVTVSWNSGALTSGVHTFPAVLQSSGLYSLSSV |
| | | VTVPSSSLGTQTYICNVNHKPSNTKVDKKVEPKSCDG |
| | | GGGSGGGGSQVQLVQSGAEVKKPGSSVKVSCKASGG |
| | | TFSSYAISWVRQAPGQGLEWMGGIIPIFGTANYAQKFQ |
| | | GRVTITADKSTSTAYMELSSLRSEDTAVYYCARSSGAY |
| | | PGYFDYWGQGTTVTVSSASTKGPSVFPLAPSSKSTSGG |
| | | TAALGCLVKDYFPEPVTVSWNSGALTSGVHTFPAVLQ |
| | | SSGLYSLSSVVTVPSSSLGTQTYICNVNHKPSNTKVDK |
| | | KVEPKSCDKTHTCPPCPAPEAAGGPSVFLFPPKPKDTL |
| | | MISRTPEVTCVVVDVSHEDPEVKFNWYVDGVEVHNA |
| | | KTKPREEQYNSTYRVVSVLTVLHQDWLNGKEYKCKV |
| | | SNKALGAPIEKTISKAKGQPREPQVYTLPPCRDELTKN |
| | | QVSLWCLVKGFYPSDIAVEWESNGQPENNYKTTPPVL |
| | | DSDGSFFLYSKLTVDKSRWQQGNVFSCSVMHEALHN |
| | | HYTQKSLSLSPGGGGGSGGGGSGGGGSGGGGSEVQLL |
| | | ESGGGLVQPGGSLRLSCAASGFTFSSYAMSWVRQAPG |
| | | KGLEWVSAIIGSGASTYYADSVKGRFTISRDNSKNTLY |
| | | LQMNSLRAEDTAVYYCAKGWFGGFNYWGQGTLVTV |
| | | SS |
| 340 | HC 2 | QVQLVQSGAEVKKPGSSVKVSCKASGGTFSSYAISWV |
| | (9B11) | RQAPGQGLEWMGGIIPIFGTANYAQKFQGRVTITADKS |
| | VHCH1_VHCH1 Fc | TSTAYMELSSLRSEDTAVYYCARSSGAYPGYFDYWGQ |
| | hole VL (4B9) | GTTVTVSSASTKGPSVFPLAPSSKSTSGGTAALGCLVK |
| | | DYFPEPVTVSWNSGALTSGVHTFPAVLQSSGLYSLSSV |
| | | VTVPSSSLGTQTYICNVNHKPSNTKVDKKVEPKSCDG |
| | | GGGSGGGGSQVQLVQSGAEVKKPGSSVKVSCKASGG |
| | | TFSSYAISWVRQAPGQGLEWMGGIIPIFGTANYAQKFQ |
| | | GRVTITADKSTSTAYMELSSLRSEDTAVYYCARSSGAY |
| | | PGYFDYWGQGTTVTVSSASTKGPSVFPLAPSSKSTSGG |
| | | TAALGCLVKDYFPEPVTVSWNSGALTSGVHTFPAVLQ |
| | | SSGLYSLSSVVTVPSSSLGTQTYICNVNHKPSNTKVDK |
| | | KVEPKSCDKTHTCPPCPAPEAAGGPSVFLFPPKPKDTL |
| | | MISRTPEVTCVVVDVSHEDPEVKFNWYVDGVEVHNA |
| | | KTKPREEQYNSTYRVVSVLTVLHQDWLNGKEYKCKV |
| | | SNKALGAPIEKTISKAKGQPREPQVCTLPPSRDELTKNQ |
| | | VSLSCAVKGFYPSDIAVEWESNGQPENNYKTTPPVLDS |
| | | DGSFFLVSKLTVDKSRWQQGNVFSCSVMHEALHNHY |
| | | TQKSLSLSPGGGGGSGGGGSGGGGSGGGGSEIVLTQSP |
| | | GTLSLSPGERATLSGRASQSVTSSYLAWYQQKPGQAPR |
| | | LLINVGSRRATGIPDRFSGSGSGTDFTLTISRLEPEDFAV |
| | | YYCQQGIMLPPTFGQGTKVEIK |

[0921] The base pair and amino acid sequences for 4+1 anti-4-1BB, anti-FAP constructs with a-FAP VL fused to knob and VH fused to hole chain can be found respectively in Table 66.

TABLE 66
Amino acid sequences of mature bispecific tetravalent
anti-4-1BB/monovalent anti-FAP huIgG1 P329GLALA kih
antibody (4 + 1 format) anti-FAP VH fused to hole
and anti-FAP VL fused to knob chain

| SEQ ID | | |
|---|---|---|
| NO: | Description | Sequence |
| 287 | (12B3) VLCL-light | see Table 48 |
| | chain | |
| | (nucleotide sequence) | |
| 341 | HC 1 | CAGGTGCAGCTGGTGCAGTCTGGCGCCGAAGTGAAG |
| | (12B3) | AAACCCGGCAGCAGCGTGAAGGTGTCCTGCAAGGCT |
| | VHCH1_VHCH1 Fc | TCCGGCGGCACCTTCAGCAGCTACGCCATTTCTTGG |
| | knob VL (4B9) | GTGCGCCAGGCCCCTGGACAGGGCCTGGAATGGATG |
| | (nucleotide sequence) | GGCGGCATCATCCCCATCTTCGGCACCGCCAACTAC |
| | | GCCCAGAAATTCCAGGGCAGAGTGACCATCACCGCC |
| | | GACAAGAGCACCAGCACCGCCTACATGGAACTGAG |
| | | CAGCCTGCGGAGCGAGGACACCGCCGTGTACTACTG |
| | | TGCCAGAAGCGAGTTCCGGTTCTACGCCGACTTCGA |
| | | CTACTGGGGCCAGGGCACCACCGTGACCGTGTCTAG |
| | | CGCTTCTACAAAGGGCCCCAGCGTGTTCCCTCTGGC |
| | | CCCTAGCAGCAAGTCTACCAGCGGAGGAACAGCCG |
| | | CCCTGGGCTGCCTCGTGAAGGACTACTTTCCCGAGC |
| | | CCGTGACAGTGTCCTGGAACAGCGGAGCCCTGACAA |
| | | GCGGCGTGCACACCTTTCCAGCCGTGCTGCAGAGCA |
| | | GCGGCCTGTACTCTCTGAGCAGCGTCGTGACTGTGC |
| | | CCAGCAGCAGCCTGGGAACCCAGACCTACATCTGCA |
| | | ACGTGAACCACAAGCCCAGCAACACCAAGGTGGAC |
| | | AAGAAGGTGGAACCCAAGAGCTGCGACGGCGGAGG |
| | | CGGATCAGGCGGCGGAGGATCCCAGGTGCAGCTGG |
| | | TGCAGAGCGGAGCTGAAGTGAAAAAGCCTGGCTCCT |
| | | CCGTGAAAGTGTCTTGTAAAGCCAGCGGCGGCACAT |
| | | TCTCATCCTACGCCATCAGCTGGGTGCGGCAGGCTC |
| | | CAGGCCAGGGACTGGAATGGATGGGAGGAATTATC |
| | | CCTATTTTTGGGACAGCCAATTATGCTCAGAAATTTC |
| | | AGGGGCGCGTGACAATTACAGCCGACAAGTCCACCT |
| | | CTACAGCTTATATGGAACTGTCCTCCCTGCGCTCCGA |
| | | GGATACAGCTGTGTATTACTGCGCTCGGAGCGAGTT |
| | | TAGATTCTATGCCGATTTTGATTATTGGGGGCAGGG |
| | | AACAACAGTGACTGTGTCCTCCGCTAGCACCAAGGG |
| | | CCCATCGGTCTTCCCCCTGGCACCCTCCTCCAAGAGC |
| | | ACCTCTGGGGGCACAGCGGCCCTGGGCTGCCTGGTC |
| | | AAGGACTACTTCCCCGAACCGGTGACGGTGTCGTGG |
| | | AACTCAGGCGCCCTGACCAGCGGCGTGCACACCTTC |
| | | CCGGCTGTCCTACAGTCCTCAGGACTCTACTCCCTCA |
| | | GCAGCGTGGTGACCGTGCCCTCCAGCAGCTTGGGCA |
| | | CCCAGACCTACATCTGCAACGTGAATCACAAGCCCA |
| | | GCAACACCAAGGTGGACAAGAAAGTTGAGCCCAAA |
| | | TCTTGTGACAAAACTCACACATGCCCACCGTGCCCA |
| | | GCACCTGAAGCTGCAGGGGGACCGTCAGTCTTCCTC |
| | | TTCCCCCCAAAACCCAAGGACACCCTCATGATCTCC |
| | | CGGACCCCTGAGGTCACATGCGTGGTGGTGGACGTG |
| | | AGCCACGAAGACCCTGAGGTCAAGTTCAACTGGTAC |
| | | GTGGACGGCGTGGAGGTGCATAATGCCAAGACAAA |
| | | GCCGCGGGAGGAGCAGTACAACAGCACGTACCGTG |
| | | TGGTCAGCGTCCTCACCGTCCTGCACCAGGACTGGC |
| | | TGAATGGCAAGGAGTACAAGTGCAAGGTCTCCAAC |
| | | AAAGCCCTCGGCGCCCCCATCGAGAAAACCATCTCC |
| | | AAAGCCAAAGGGCAGCCCCGAGAACCACAGGTGTA |
| | | CACCCTGCCCCCCTGCAGAGATGAGCTGACCAAGAA |
| | | CCAGGTGTCCCTGTGGTGTCTGGTCAAGGGCTTCTA |
| | | CCCCAGCGATATCGCCGTGGAGTGGGAGAGCAACG |
| | | GCCAGCCTGAGAACAACTACAAGACCACCCCCCCTG |
| | | TGCTGGACAGCGACGGCAGCTTCTTCCTGTACTCCA |
| | | AACTGACCGTGGACAAGAGCCGGTGGCAGCAGGGC |
| | | AACGTGTTCAGCTGCAGCGTGATGCACGAGGCCCTG |
| | | CACAACCACTACACCCAGAAGTCCCTGAGCCTGAGC |
| | | CCCGGCGGAGGCGGCGGAAGCGGAGGAGGAGGATC |
| | | TGGGGGCGGAGGTTCCGGAGGCGGTGGATCTGAGAT |
| | | CGTGCTGACCCAGTCTCCCGGCACCCTGTCTCTGAG |
| | | CCCTGGCGAGAGAGCCACCCTGTCCTGCAGAGCCTC |
| | | CCAGTCCGTGACCTCCTCCTACCTCGCCTGGTATCAG |
| | | CAGAAGCCCGGCCAGGCCCCTCGGCTGCTGATCAAC |
| | | GTGGGCAGTCGGAGAGCCACCGGCATCCCTGACCGG |
| | | TTCTCCGGCTCTGGCTCCGGCACCGACTTCACCCTGA |
| | | CCATCTCCCGGCTGGAACCCGAGGACTTCGCCGTGT |
| | | ACTACTGCCAGCAGGGCATCATGCTGCCCCCCACCT |
| | | TTGGCCAGGGCACCAAGGTGGAAATCAAG |
| 342 | HC 2 | CAGGTGCAGCTGGTGCAGTCTGGCGCCGAAGTGAAG |
| | (12B3) | AAACCCGGCAGCAGCGTGAAGGTGTCCTGCAAGGCT |
| | VHCH1_VHCH1 Fc | TCCGGCGGCACCTTCAGCAGCTACGCCATTTCTTGG |
| | hole VH (4B9) | GTGCGCCAGGCCCCTGGACAGGGCCTGGAATGGATG |
| | (nucleotide sequence) | GGCGGCATCATCCCCATCTTCGGCACCGCCAACTAC |
| | | GCCCAGAAATTCCAGGGCAGAGTGACCATCACCGCC |
| | | GACAAGAGCACCAGCACCGCCTACATGGAACTGAG |
| | | CAGCCTGCGGAGCGAGGACACCGCCGTGTACTACTG |
| | | TGCCAGAAGCGAGTTCCGGTTCTACGCCGACTTCGA |
| | | CTACTGGGGCCAGGGCACCACCGTGACCGTGTCTAG |
| | | CGCTTCTACAAAGGGCCCCAGCGTGTTCCCTCTGGC |
| | | CCCTAGCAGCAAGTCTACCAGCGGAGGAACAGCCG |
| | | CCCTGGGCTGCCTCGTGAAGGACTACTTTCCCGAGC |
| | | CCGTGACAGTGTCCTGGAACAGCGGAGCCCTGACAA |
| | | GCGGCGTGCACACCTTTCCAGCCGTGCTGCAGAGCA |
| | | GCGGCCTGTACTCTCTGAGCAGCGTCGTGACTGTGC |
| | | CCAGCAGCAGCCTGGGAACCCAGACCTACATCTGCA |
| | | ACGTGAACCACAAGCCCAGCAACACCAAGGTGGAC |
| | | AAGAAGGTGGAACCCAAGAGCTGCGACGGCGGAGG |
| | | CGGATCAGGCGGCGGAGGATCCCAGGTGCAGCTGG |
| | | TGCAGAGCGGAGCTGAAGTGAAAAAGCCTGGCTCCT |
| | | CCGTGAAAGTGTCTTGTAAAGCCAGCGGCGGCACAT |
| | | TCTCATCCTACGCCATCAGCTGGGTGCGGCAGGCTC |
| | | CAGGCCAGGGACTGGAATGGATGGGAGGAATTATC |
| | | CCTATTTTTGGGACAGCCAATTATGCTCAGAAATTTC |
| | | AGGGGCGCGTGACAATTACAGCCGACAAGTCCACCT |
| | | CTACAGCTTATATGGAACTGTCCTCCCTGCGCTCCGA |
| | | GGATACAGCTGTGTATTACTGCGCTCGGAGCGAGTT |
| | | TAGATTCTATGCCGATTTTGATTATTGGGGGCAGGG |
| | | AACAACAGTGACTGTGTCCTCCGCTAGCACCAAGGG |
| | | CCCATCGGTCTTCCCCCTGGCACCCTCCTCCAAGAGC |
| | | ACCTCTGGGGGCACAGCGGCCCTGGGCTGCCTGGTC |
| | | AAGGACTACTTCCCCGAACCGGTGACGGTGTCGTGG |
| | | AACTCAGGCGCCCTGACCAGCGGCGTGCACACCTTC |
| | | CCGGCTGTCCTACAGTCCTCAGGACTCTACTCCCTCA |
| | | GCAGCGTGGTGACCGTGCCCTCCAGCAGCTTGGGCA |
| | | CCCAGACCTACATCTGCAACGTGAATCACAAGCCCA |
| | | GCAACACCAAGGTGGACAAGAAAGTTGAGCCCAAA |
| | | TCTTGTGACAAAACTCACACATGCCCACCGTGCCCA |
| | | GCACCTGAAGCTGCAGGGGGACCGTCAGTCTTCCTC |
| | | TTCCCCCCAAAACCCAAGGACACCCTCATGATCTCC |
| | | CGGACCCCTGAGGTCACATGCGTGGTGGTGGACGTG |
| | | AGCCACGAAGACCCTGAGGTCAAGTTCAACTGGTAC |
| | | GTGGACGGCGTGGAGGTGCATAATGCCAAGACAAA |
| | | GCCGCGGGAGGAGCAGTACAACAGCACGTACCGTG |
| | | TGGTCAGCGTCCTCACCGTCCTGCACCAGGACTGGC |
| | | TGAATGGCAAGGAGTACAAGTGCAAGGTCTCCAAC |
| | | AAAGCCCTCGGCGCCCCCATCGAGAAAACCATCTCC |
| | | AAAGCCAAAGGGCAGCCCCGAGAACCACAGGTGTG |
| | | CACCCTGCCCCCATCCCGGGATGAGCTGACCAAGAA |
| | | CCAGGTCAGCCTCTCGTGCGCAGTCAAAGGCTTCTA |
| | | TCCCAGCGACATCGCCGTGGAGTGGGAGAGCAATG |
| | | GGCAGCCGGAGAACAACTACAAGACCACGCCTCCC |
| | | GTGCTGGACTCCGACGGCTCCTTCTTCCTCGTGAGCA |
| | | AGCTCACCGTGGACAAGAGCAGGTGGCAGCAGGGG |
| | | AACGTCTTCTCATGCTCCGTGATGCATGAGGCTCTGC |
| | | ACAACCACTACACGCAGAAGAGCCTCTCCCTGTCTC |
| | | CGGGTGGAGGCGGCGGAAGCGGAGGAGGAGGATCC |
| | | GGCGGCGGAGGTTCCGGAGGCGGAGGATCCGAGGT |
| | | GCAGCTGCTCGAAAGCGGCGGAGGACTGGTGCAGC |
| | | CTGGCGGCAGCCTGAGACTGTCTTGCGCCGCCAGCG |
| | | GCTTCACCTTCAGCAGCTACGCCATGAGCTGGGTCC |
| | | GCCAGGCCCCTGGCAAGGGACTGGAATGGGTGTCCG |
| | | CCATCATCGGCTCTGGCGCCAGCACCTACTACGCCG |
| | | ACAGCGTGAAGGGCCGGTTCACCATCAGCCGGGAC |
| | | AACAGCAAGAACACCCTGTACCTGCAGATGAACAG |
| | | CCTGCGGGCCGAGGACACCGCCGTGTACTACTGCGC |
| | | CAAGGGATGGTTCGGCGGCTTCAACTACTGGGGACA |
| | | GGGCACCCTGGTCACCGTGTCCAGC |
| 289 | (12B3) VLCL-light | see Table 48 |
| | chain | |
| 343 | HC 1 | QVQLVQSGAEVKKPGSSVKVSCKASGGTFSSYAISWV |
| | (12B3) | RQAPGQGLEWMGGIIPIFGTANYAQKFQGRVTITADKS |
| | VHCH1_VHCH1 Fc | TSTAYMELSSLRSEDTAVYYCARSEFRFYADFDYWGQ |
| | knob VL (4B9) | GTTVTVSSASTKGPSVFPLAPSSKSTSGGTAALGCLVK |
| | | DYFPEPVTVSWNSGALTSGVHTFPAVLQSSGLYSLSSV |
| | | VTVPSSSLGTQTYICNVNHKPSNTKVDKKVEPKSCDG |
| | | GGGSGGGGS |
| | | QVQLVQSGAEVKKPGSSVKVSCKASGGTFSSYAISWV |
| | | RQAPGQGLEWMGGIIPIFGTANYAQKFQGRVTITADKS |
| | | TSTAYMELSSLRSEDTAVYYCARSEFRFYADFDYWGQ |
| | | GTTVTVSSASTKGPSVFPLAPSSKSTSGGTAALGCLVK |
| | | DYFPEPVTVSWNSGALTSGVHTFPAVLQSSGLYSLSSV |
| | | VTVPSSSLGTQTYICNVNHKPSNTKVDKKVEPKSCDKT |
| | | HTCPPCPAPEAAGGPSVFLFPPKPKDTLMISRTPEVTCV |
| | | VVDVSHEDPEVKFNWYVDGVEVHNAKTKPREEQYNS |
| | | TYRVVSVLTVLHQDWLNGKEYKCKVSNKALGAPIEKT |
| | | ISKAKGQPREPQVYTLPPCRDELTKNQVSLWCLVKGF |
| | | YPSDIAVEWESNGQPENNYKTTPPVLDSDGSFFLYSKL |
| | | TVDKSRWQQGNVFSCSVMHEALHNHYTQKSLSLSPG |
| | | GGGGSGGGGSGGGGSGGGGSEIVLTQSPGTLSLSPGER |
| | | ATLSCRASQSVTSSYLAWYQQKPGQAPRLLINVGSRR |
| | | ATGIPDRFSGSGSGTDFTLTISRLEPEDFAVYYCQQGIM |
| | | LPPTFGQGTKVEIK |
| 344 | HC 2 | QVQLVQSGAEVKKPGSSVKVSCKASGGTFSSYAISWV |
| | (12B3) | RQAPGQGLEWMGGIIPIFGTANYAQKFQGRVTITADKS |
| | VHCH1_VHCH1 Fc | TSTAYMELSSLRSEDTAVYYCARSEFRFYADFDYWGQ |
| | hole VH (4B9) | GTTVTVSSASTKGPSVFPLAPSSKSTSGGTAALGCLVK |
| | | DYFPEPVTVSWNSGALTSGVHTFPAVLQSSGLYSLSSV |
| | | VTVPSSSLGTQTYICNVNHKPSNTKVDKKVEPKSCDG |
| | | GGGSGGGGSQVQLVQSGAEVKKPGSSVKVSCKASGG |
| | | TFSSYAISWVRQAPGQGLEWMGGIIPIFGTANYAQKFQ |
| | | GRVTITADKSTSTAYMELSSLRSEDTAVYYCARSEFRF |
| | | YADFDYWGQGTTVTVSSASTKGPSVFPLAPSSKSTSGG |
| | | TAALGCLVKDYFPEPVTVSWNSGALTSGVHTFPAVLQ |
| | | SSGLYSLSSWTVPSSSLGTQTYICNVNHKPSNTKVDK |
| | | KVEPKSCDKTHTCPPCPAPEAAGGPSVFLFPPKPKDTL |
| | | MISRTPEVTCVVVDVSHEDPEVKFNWYVDGVEVHNA |
| | | KTKPREEQYNSTYRVVSVLTVLHQDWLNGKEYKCKV |
| | | SNKALGAPIEKTISKAKGQPREPQVCTLPPSRDELTKNQ |
| | | VSLSCAVKGFYPSDIAVEWESNGQPENNYKTTPPVLDS |
| | | DGSFFLVSKLTVDKSRWQQGNVFSCSVMHEALHNHY |
| | | TQKSLSLSPGGGGGSGGGGSGGGGSGGGGSEVQLLES |
| | | GGGLVQPGGSLRLSCAASGFTFSSYAMSWVRQAPGKG |
| | | LEWVSAIIGSGASTYYADSVKGRFTISRDNSKNTLYLQ |
| | | MNSLRAEDTAVYYCAKGWFGGFNYWGQGTLVTVSS |
| 291 | (25G7) VLCL-light | see Table 48 |
| | chain | |
| | (nucleotide sequence) | |
| 345 | HC 1 | GAGGTGCAGCTGCTGGAATCTGGCGGCGGACTGGTG |
| | (25G7) | CAGCCTGGCGGATCTCTGAGACTGAGCTGTGCCGCC |
| | VHCH1_VHCH1 Fc | AGCGGCTTCACCTTCAGCAGCTACGCCATGAGCTGG |
| | knob VL (4B9) | GTGCGCCAGGCCCCTGGAAAAGGCCTGGAATGGGT |
| | (nucleotide sequence) | GTCCGCCATCTCTGGCAGCGGCGGCAGCACCTACTA |
| | | CGCCGATTCTGTGAAGGGCCGGTTCACCATCAGCCG |
| | | GGACAACAGCAAGAACACCCTGTACCTGCAGATGA |
| | | ACAGCCTGCGGGCCGAGGACACCGCCGTGTACTATT |
| | | GCGCCAGGGACGACCCCTGGCCCCCCTTTGATTATT |
| | | GGGGACAGGGCACCCTCGTGACCGTGTCCAGCGCTT |
| | | CTACAAAGGGCCCCAGCGTGTTCCCTCTGGCCCCTA |
| | | GCAGCAAGTCTACCAGCGGAGGAACAGCCGCCCTG |
| | | GGCTGCCTCGTGAAGGACTACTTTCCCGAGCCCGTG |
| | | ACAGTGTCCTGGAACAGCGGAGCCCTGACAAGCGG |
| | | CGTGCACACCTTTCCAGCCGTGCTGCAGAGCAGCGG |
| | | CCTGTACTCTCTGAGCAGCGTCGTGACTGTGCCCAG |
| | | CAGCAGCCTGGGAACCCAGACCTACATCTGCAACGT |
| | | GAACCACAAGCCCAGCAACACCAAGGTGGACAAGA |
| | | AGGTGGAACCCAAGAGCTGCGACGGCGGAGGCGGA |
| | | TCAGGCGGCGGAGGATCCGAAGTGCAGCTGCTGGA |
| | | AAGTGGGGGAGGCCTGGTGCAGCCAGGGGGAAGCC |
| | | TGAGACTGTCTTGTGCCGCTTCCGGCTTTACCTTTAG |
| | | CTCTTACGCCATGTCTTGGGTGCGGCAGGCTCCAGG |
| | | CAAGGGACTGGAATGGGTGTCAGCTATCAGCGGCTC |
| | | TGGCGGCTCCACATATTACGCCGACAGCGTGAAGGG |
| | | CAGATTCACAATCTCCAGAGACAACTCCAAGAATAC |
| | | TCTGTACCTGCAGATGAATTCCCTGCGCGCCGAAGA |
| | | TACAGCTGTGTATTACTGTGCCCGCGACGATCCTTG |
| | | GCCCCCTTTCGACTACTGGGGGCAGGGAACACTCGT |
| | | GACAGTGTCATCCGCTAGCACCAAGGGCCCATCGGT |
| | | CTTCCCCCTGGCACCCTCCTCCAAGAGCACCTCTGG |
| | | GGGCACAGCGGCCCTGGGCTGCCTGGTCAAGGACTA |
| | | CTTCCCCGAACCGGTGACGGTGTCGTGGAACTCAGG |
| | | CGCCCTGACCAGCGGCGTGCACACCTTCCCGGCTGT |
| | | CCTACAGTCCTCAGGACTCTACTCCCTCAGCAGCGT |
| | | GGTGACCGTGCCCTCCAGCAGCTTGGGCACCCAGAC |
| | | CTACATCTGCAACGTGAATCACAAGCCCAGCAACAC |
| | | CAAGGTGGACAAGAAAGTTGAGCCCAAATCTTGTGA |
| | | CAAAACTCACACATGCCCACCGTGCCCAGCACCTGA |
| | | AGCTGCAGGGGGACCGTCAGTCTTCCTCTTCCCCCC |
| | | AAAACCCAAGGACACCCTCATGATCTCCCGGACCCC |
| | | TGAGGTCACATGCGTGGTGGTGGACGTGAGCCACGA |
| | | AGACCCTGAGGTCAAGTTCAACTGGTACGTGGACGG |
| | | CGTGGAGGTGCATAATGCCAAGACAAAGCCGCGGG |
| | | AGGAGCAGTACAACAGCACGTACCGTGTGGTCAGC |
| | | GTCCTCACCGTCCTGCACCAGGACTGGCTGAATGGC |
| | | AAGGAGTACAAGTGCAAGGTCTCCAACAAAGCCCTC |
| | | GGCGCCCCCATCGAGAAAACCATCTCCAAAGCCAAA |
| | | GGGCAGCCCCGAGAACCACAGGTGTACACCCTGCCC |
| | | CCCTGCAGAGATGAGCTGACCAAGAACCAGGTGTCC |
| | | CTGTGGTGTCTGGTCAAGGGCTTCTACCCCAGCGAT |
| | | ATCGCCGTGGAGTGGGAGAGCAACGGCCAGCCTGA |
| | | GAACAACTACAAGACCACCCCCCCTGTGCTGGACAG |
| | | CGACGGCAGCTTCTTCCTGTACTCCAAACTGACCGT |
| | | GGACAAGAGCCGGTGGCAGCAGGGCAACGTGTTCA |
| | | GCTGCAGCGTGATGCACGAGGCCCTGCACAACCACT |
| | | ACACCCAGAAGTCCCTGAGCCTGAGCCCCGGCGGAG |
| | | GCGGCGGAAGCGGAGGAGGAGGATCTGGGGGCGGA |
| | | GGTTCCGGAGGCGGTGGATCTGAGATCGTGCTGACC |
| | | CAGTCTCCCGGCACCCTGTCTCTGAGCCCTGGCGAG |
| | | AGAGCCACCCTGTCCTGCAGAGCCTCCCAGTCCGTG |
| | | ACCTCCTCCTACCTCGCCTGGTATCAGCAGAAGCCC |
| | | GGCCAGGCCCCTCGGCTGCTGATCAACGTGGGCAGT |
| | | CGGAGAGCCACCGGCATCCCTGACCGGTTCTCCGGC |
| | | TCTGGCTCCGGCACCGACTTCACCCTGACCATCTCCC |
| | | GGCTGGAACCCGAGGACTTCGCCGTGTACTACTGCC |
| | | AGCAGGGCATCATGCTGCCCCCCACCTTTGGCCAGG |
| | | GCACCAAGGTGGAAATCAAG |
| 346 | HC 2 | GAGGTGCAGCTGCTGGAATCTGGCGGCGGACTGGTG |
| | (25G7) | CAGCCTGGCGGATCTCTGAGACTGAGCTGTGCCGCC |
| | VHCH1_VHCH1 Fc | AGCGGCTTCACCTTCAGCAGCTACGCCATGAGCTGG |
| | hole VH (4B9) | GTGCGCCAGGCCCCTGGAAAAGGCCTGGAATGGGT |
| | (nucleotide sequence) | GTCCGCCATCTCTGGCAGCGGCGGCAGCACCTACTA |
| | | CGCCGATTCTGTGAAGGGCCGGTTCACCATCAGCCG |
| | | GGACAACAGCAAGAACACCCTGTACCTGCAGATGA |
| | | ACAGCCTGCGGGCCGAGGACACCGCCGTGTACTATT |
| | | GCGCCAGGGACGACCCCTGGCCCCCCTTTGATTATT |
| | | GGGGACAGGGCACCCTCGTGACCGTGTCCAGCGCTT |
| | | CTACAAAGGGCCCCAGCGTGTTCCCTCTGGCCCCTA |
| | | GCAGCAAGTCTACCAGCGGAGGAACAGCCGCCCTG |
| | | GGCTGCCTCGTGAAGGACTACTTTCCCGAGCCCGTG |
| | | ACAGTGTCCTGGAACAGCGGAGCCCTGACAAGCGG |
| | | CGTGCACACCTTTCCAGCCGTGCTGCAGAGCAGCGG |
| | | CCTGTACTCTCTGAGCAGCGTCGTGACTGTGCCCAG |
| | | CAGCAGCCTGGGAACCCAGACCTACATCTGCAACGT |
| | | GAACCACAAGCCCAGCAACACCAAGGTGGACAAGA |
| | | AGGTGGAACCCAAGAGCTGCGACGGCGGAGGCGGA |
| | | TCAGGCGGCGGAGGATCCGAAGTGCAGCTGCTGGA |
| | | AAGTGGGGGAGGCCTGGTGCAGCCAGGGGGAAGCC |
| | | TGAGACTGTCTTGTGCCGCTTCCGGCTTTACCTTTAG |
| | | CTCTTACGCCATGTCTTGGGTGCGGCAGGCTCCAGG |
| | | CAAGGGACTGGAATGGGTGTCAGCTATCAGCGGCTC |
| | | TGGCGGCTCCACATATTACGCCGACAGCGTGAAGGG |
| | | CAGATTCACAATCTCCAGAGACAACTCCAAGAATAC |
| | | TCTGTACCTGCAGATGAATTCCCTGCGCGCCGAAGA |
| | | TACAGCTGTGTATTACTGTGCCCGCGACGATCCTTG |
| | | GCCCCCTTTCGACTACTGGGGGCAGGGAACACTCGT |
| | | GACAGTGTCATCCGCTAGCACCAAGGGCCCATCGGT |
| | | CTTCCCCCTGGCACCCTCCTCCAAGAGCACCTCTGG |
| | | GGGCACAGCGGCCCTGGGCTGCCTGGTCAAGGACTA |
| | | CTTCCCCGAACCGGTGACGGTGTCGTGGAACTCAGG |
| | | CGCCCTGACCAGCGGCGTGCACACCTTCCCGGCTGT |
| | | CCTACAGTCCTCAGGACTCTACTCCCTCAGCAGCGT |
| | | GGTGACCGTGCCCTCCAGCAGCTTGGGCACCCAGAC |
| | | CTACATCTGCAACGTGAATCACAAGCCCAGCAACAC |
| | | CAAGGTGGACAAGAAAGTTGAGCCCAAATCTTGTGA |
| | | CAAAACTCACACATGCCCACCGTGCCCAGCACCTGA |
| | | AGCTGCAGGGGGACCGTCAGTCTTCCTCTTCCCCCC |
| | | AAAACCCAAGGACACCCTCATGATCTCCCGGACCCC |
| | | TGAGGTCACATGCGTGGTGGTGGACGTGAGCCACGA |
| | | AGACCCTGAGGTCAAGTTCAACTGGTACGTGGACGG |
| | | CGTGGAGGTGCATAATGCCAAGACAAAGCCGCGGG |
| | | AGGAGCAGTACAACAGCACGTACCGTGTGGTCAGC |
| | | GTCCTCACCGTCCTGCACCAGGACTGGCTGAATGGC |
| | | AAGGAGTACAAGTGCAAGGTCTCCAACAAAGCCCTC |
| | | GGCGCCCCCATCGAGAAAACCATCTCCAAAGCCAAA |
| | | GGGCAGCCCCGAGAACCACAGGTGTGCACCCTGCCC |
| | | CCATCCCGGGATGAGCTGACCAAGAACCAGGTCAGC |
| | | CTCTCGTGCGCAGTCAAAGGCTTCTATCCCAGCGAC |
| | | ATCGCCGTGGAGTGGGAGAGCAATGGGCAGCCGGA |
| | | GAACAACTACAAGACCACGCCTCCCGTGCTGGACTC |
| | | CGACGGCTCCTTCTTCCTCGTGAGCAAGCTCACCGT |
| | | GGACAAGAGCAGGTGGCAGCAGGGGAACGTCTTCT |
| | | CATGCTCCGTGATGCATGAGGCTCTGCACAACCACT |
| | | ACACGCAGAAGAGCCTCTCCCTGTCTCCGGGTGGAG |
| | | GCGGCGGAAGCGGAGGAGGAGGATCCGGCGGCGGA |
| | | GGTTCCGGAGGCGGAGGATCCGAGGTGCAGCTGCTC |
| | | GAAAGCGGCGGAGGACTGGTGCAGCCTGGCGGCAG |
| | | CCTGAGACTGTCTTGCGCCGCCAGCGGCTTCACCTTC |
| | | AGCAGCTACGCCATGAGCTGGGTCCGCCAGGCCCCT |
| | | GGCAAGGGACTGGAATGGGTGTCCGCCATCATCGGC |
| | | TCTGGCGCCAGCACCTACTACGCCGACAGCGTGAAG |
| | | GGCCGGTTCACCATCAGCCGGGACAACAGCAAGAA |
| | | CACCCTGTACCTGCAGATGAACAGCCTGCGGGCCGA |
| | | GGACACCGCCGTGTACTACTGCGCCAAGGGATGGTT |
| | | CGGCGGCTTCAACTACTGGGGACAGGGCACCCTGGT |
| | | CACCGTGTCCAGC |
| 293 | (25G7) VLCL-light | see Table 48 |
| | chain | |
| 347 | HC 1 | EVQLLESGGGLVQPGGSLRLSCAASGFTFSSYAMSWV |
| | (25G7) | RQAPGKGLEWVSAISGSGGSTYYADSVKGRFTISRDNS |
| | VHCH1_VHCH1 Fc | KNTLYLQMNSLRAEDTAVYYCARDDPWPPFDYWGQ |
| | knob VL (4B9) | GTLVTVSSASTKGPSVFPLAPSSKSTSGGTAALGCLVK |
| | | DYFPEPVTVSWNSGALTSGVHTFPAVLQSSGLYSLSSV |
| | | VTVPSSSLGTQTYICNVNHKPSNTKVDKKVEPKSCDG |
| | | GGGSGGGGSEVQLLESGGGLVQPGGSLRLSCAASGFT |
| | | FSSYAMSWVRQAPGKGLEWVSAISGSGGSTYYADSVK |
| | | GRFTISRDNSKNTLYLQMNSLRAEDTAVYYCARDDPW |
| | | PPFDYWGQGTLVTVSSASTKGPSVFPLAPSSKSTSGGT |
| | | AALGCLVKDYFPEPVTVSWNSGALTSGVHTFPAVLQS |
| | | SGLYSLSSVVTVPSSSLGTQTYICNVNHKPSNTKVDKK |
| | | VEPKSCDKTHTCPPCPAPEAAGGPSVFLFPPKPKDTLMI |
| | | SRTPEVTCVVVDVSHEDPEVKFNWYVDGVEVHNAKT |
| | | KPREEQYNSTYRVVSVLTVLHQDWLNGKEYKCKVSN |
| | | KALGAPIEKTISKAKGQPREPQVYTLPPCRDELTKNQV |
| | | SLWCLVKGFYPSDIAVEWESNGQPENNYKTTPPVLDS |
| | | DGSFFLYSKLTVDKSRWQQGNVFSCSVMHEALHNHY |
| | | TQKSLSLSPGGGGGSGGGGSGGGGSGGGGSEIVLTQSP |
| | | GTLSLSPGERATLSGRASQSVTSSYLAWYQQKPGQAPR |
| | | LLINVGSRRATGIPDRFSGSGSGTDFTLTISRLEPEDFAV |
| | | YYCQQGIMLPPTFGQGTKVEIK |
| 348 | HC 2 | EVQLLESGGGLVQPGGSLRLSCAASGFTFSSYAMSWV |
| | (25G7) | RQAPGKGLEWVSAISGSGGSTYYADSVKGRFTISRDNS |
| | VHCH1_VHCH1 Fc | KNTLYLQMNSLRAEDTAVYYCARDDPWPPFDYWGQ |
| | hole VH (4B9) | GTLVTVSSASTKGPSVFPLAPSSKSTSGGTAALGCLVK |
| | | DYFPEPVTVSWNSGALTSGVHTFPAVLQSSGLYSLSSV |
| | | VTVPSSSLGTQTYICNVNHKPSNTKVDKKVEPKSCDG |
| | | GGGSGGGGSEVQLLESGGGLVQPGGSLRLSCAASGFT |
| | | FSSYAMSWVRQAPGKGLEWVSAISGSGGSTYYADSVK |
| | | GRFTISRDNSKNTLYLQMNSLRAEDTAVYYCARDDPW |
| | | PPFDYWGQGTLVTVSSASTKGPSVFPLAPSSKSTSGGT |
| | | AALGCLVKDYFPEPVTVSWNSGALTSGVHTFPAVLQS |
| | | SGLYSLSSVVTVPSSSLGTQTYICNVNHKPSNTKVDKK |
| | | VEPKSCDKTHTCPPCPAPEAAGGPSVFLFPPKPKDTLMI |
| | | SRTPEVTCVVVDVSHEDPEVKFNWYVDGVEVHNAKT |
| | | KPREEQYNSTYRVVSVLTVLHQDWLNGKEYKCKVSN |
| | | KALGAPIEKTISKAKGQPREPQVCTLPPSRDELTKNQVS |
| | | LSCAVKGFYPSDIAVEWESNGQPENNYKTTPPVLDSD |
| | | GSFFLVSKLTVDKSRWQQGNVFSCSVMHEALHNHYT |
| | | QKSLSLSPGGGGGSGGGGSGGGGSGGGGSEVQLLESG |
| | | GGLVQPGGSLRLSCAASGFTFSSYAMSWVRQAPGKGL |
| | | EWVSAIIGSGASTYYADSVKGRFTISRDNSKNTLYLQM |
| | | NSLRAEDTAVYYCAKGWFGGFNYWGQGTLVTVSS |
| 295 | (11D5) VLCL-light | see Table 48 |
| | chain | |
| | (nucleotide sequence) | |
| 349 | HC 1 | CAGGTGCAGCTGGTGCAGTCTGGCGCCGAAGTGAAG |
| | (11D5) | AAACCCGGCAGCAGCGTGAAGGTGTCCTGCAAGGCT |
| | VHCH1_VHCH1 Fc | TCCGGCGGCACCTTCAGCAGCTACGCCATTTCTTGG |
| | knob VL (4B9) | GTGCGCCAGGCCCCTGGACAGGGCCTGGAATGGATG |
| | (nucleotide sequence) | GGCGGCATCATCCCCATCTTCGGCACCGCCAACTAC |
| | | GCCCAGAAATTCCAGGGCAGAGTGACCATCACCGCC |
| | | GACAAGAGCACCAGCACCGCCTACATGGAACTGAG |
| | | CAGCCTGCGGAGCGAGGACACCGCCGTGTACTACTG |
| | | TGCCAGAAGCACCCTGATCTACGGCTACTTCGACTA |
| | | CTGGGGCCAGGGCACCACCGTGACCGTGTCTAGCGC |
| | | TTCTACCAAGGGCCCCAGCGTGTTCCCTCTGGCCCCT |
| | | AGCAGCAAGAGCACATCTGGCGGAACAGCCGCCCT |
| | | GGGCTGCCTCGTGAAGGACTACTTTCCCGAGCCCGT |
| | | GACAGTGTCCTGGAACTCTGGCGCCCTGACAAGCGG |
| | | CGTGCACACCTTTCCAGCCGTGCTGCAGAGCAGCGG |
| | | CCTGTACTCTCTGAGCAGCGTCGTGACTGTGCCCAG |
| | | CAGCAGCCTGGGAACCCAGACCTACATCTGCAACGT |
| | | GAACCACAAGCCCAGCAACACCAAGGTGGACAAGA |
| | | AGGTGGAACCCAAGAGCTGCGACGGCGGAGGCGGA |
| | | TCTGGCGGCGGAGGATCCCAGGTGCAGCTGGTGCAG |
| | | AGCGGAGCTGAAGTGAAAAAGCCTGGCTCCTCCGTG |
| | | AAAGTGTCTTGTAAAGCCAGCGGCGGCACATTCTCA |
| | | TCCTACGCCATCAGCTGGGTGCGGCAGGCTCCAGGC |
| | | CAGGGACTGGAATGGATGGGAGGAATTATCCCTATT |
| | | TTTGGGACAGCCAATTATGCTCAGAAATTTCAGGGG |
| | | CGCGTGACAATTACAGCCGACAAGTCCACCTCTACA |
| | | GCTTATATGGAACTGTCCTCCCTGCGCTCCGAGGAT |
| | | ACAGCTGTGTATTACTGCGCCCGGTCCACACTGATC |
| | | TATGGATACTTTGATTATTGGGGGCAGGGAACAACA |
| | | GTGACTGTGTCCTCCGCTAGCACCAAGGGCCCATCG |
| | | GTCTTCCCCCTGGCACCCTCCTCCAAGAGCACCTCTG |
| | | GGGGCACAGCGGCCCTGGGCTGCCTGGTCAAGGACT |
| | | ACTTCCCCGAACCGGTGACGGTGTCGTGGAACTCAG |
| | | GCGCCCTGACCAGCGGCGTGCACACCTTCCCGGCTG |
| | | TCCTACAGTCCTCAGGACTCTACTCCCTCAGCAGCGT |
| | | GGTGACCGTGCCCTCCAGCAGCTTGGGCACCCAGAC |
| | | CTACATCTGCAACGTGAATCACAAGCCCAGCAACAC |
| | | CAAGGTGGACAAGAAAGTTGAGCCCAAATCTTGTGA |
| | | CAAAACTCACACATGCCCACCGTGCCCAGCACCTGA |
| | | AGCTGCAGGGGGACCGTCAGTCTTCCTCTTCCCCCC |
| | | AAAACCCAAGGACACCCTCATGATCTCCCGGACCCC |
| | | TGAGGTCACATGCGTGGTGGTGGACGTGAGCCACGA |
| | | AGACCCTGAGGTCAAGTTCAACTGGTACGTGGACGG |
| | | CGTGGAGGTGCATAATGCCAAGACAAAGCCGCGGG |
| | | AGGAGCAGTACAACAGCACGTACCGTGTGGTCAGC |
| | | GTCCTCACCGTCCTGCACCAGGACTGGCTGAATGGC |
| | | AAGGAGTACAAGTGCAAGGTCTCCAACAAAGCCCTC |
| | | GGCGCCCCCATCGAGAAAACCATCTCCAAAGCCAAA |
| | | GGGCAGCCCCGAGAACCACAGGTGTACACCCTGCCC |
| | | CCCTGCAGAGATGAGCTGACCAAGAACCAGGTGTCC |
| | | CTGTGGTGTCTGGTCAAGGGCTTCTACCCCAGCGAT |
| | | ATCGCCGTGGAGTGGGAGAGCAACGGCCAGCCTGA |
| | | GAACAACTACAAGACCACCCCCCCTGTGCTGGACAG |
| | | CGACGGCAGCTTCTTCCTGTACTCCAAACTGACCGT |
| | | GGACAAGAGCCGGTGGCAGCAGGGCAACGTGTTCA |
| | | GCTGCAGCGTGATGCACGAGGCCCTGCACAACCACT |
| | | ACACCCAGAAGTCCCTGAGCCTGAGCCCCGGCGGAG |
| | | GCGGCGGAAGCGGAGGAGGAGGATCTGGGGGCGGA |
| | | GGTTCCGGAGGCGGTGGATCTGAGATCGTGCTGACC |
| | | CAGTCTCCCGGCACCCTGTCTCTGAGCCCTGGCGAG |
| | | AGAGCCACCCTGTCCTGCAGAGCCTCCCAGTCCGTG |
| | | ACCTCCTCCTACCTCGCCTGGTATCAGCAGAAGCCC |
| | | GGCCAGGCCCCTCGGCTGCTGATCAACGTGGGCAGT |
| | | CGGAGAGCCACCGGCATCCCTGACCGGTTCTCCGGC |
| | | TCTGGCTCCGGCACCGACTTCACCCTGACCATCTCCC |
| | | GGCTGGAACCCGAGGACTTCGCCGTGTACTACTGCC |
| | | AGCAGGGCATCATGCTGCCCCCCACCTTTGGCCAGG |
| | | GCACCAAGGTGGAAATCAAG |
| 350 | HC 2 | CAGGTGCAGCTGGTGCAGTCTGGCGCCGAAGTGAAG |
| | (11D5) | AAACCCGGCAGCAGCGTGAAGGTGTCCTGCAAGGCT |
| | VHCH1_VHCH1 Fc | TCCGGCGGCACCTTCAGCAGCTACGCCATTTCTTGG |
| | hole VH (4B9) | GTGCGCCAGGCCCCTGGACAGGGCCTGGAATGGATG |
| | (nucleotide sequence) | GGCGGCATCATCCCCATCTTCGGCACCGCCAACTAC |
| | | GCCCAGAAATTCCAGGGCAGAGTGACCATCACCGCC |
| | | GACAAGAGCACCAGCACCGCCTACATGGAACTGAG |
| | | CAGCCTGCGGAGCGAGGACACCGCCGTGTACTACTG |
| | | TGCCAGAAGCACCCTGATCTACGGCTACTTCGACTA |
| | | CTGGGGCCAGGGCACCACCGTGACCGTGTCTAGCGC |
| | | TTCTACCAAGGGCCCCAGCGTGTTCCCTCTGGCCCCT |
| | | AGCAGCAAGAGCACATCTGGCGGAACAGCCGCCCT |
| | | GGGCTGCCTCGTGAAGGACTACTTTCCCGAGCCCGT |
| | | GACAGTGTCCTGGAACTCTGGCGCCCTGACAAGCGG |
| | | CGTGCACACCTTTCCAGCCGTGCTGCAGAGCAGCGG |
| | | CCTGTACTCTCTGAGCAGCGTCGTGACTGTGCCCAG |
| | | CAGCAGCCTGGGAACCCAGACCTACATCTGCAACGT |
| | | GAACCACAAGCCCAGCAACACCAAGGTGGACAAGA |
| | | AGGTGGAACCCAAGAGCTGCGACGGCGGAGGCGGA |
| | | TCTGGCGGCGGAGGATCCCAGGTGCAGCTGGTGCAG |
| | | AGCGGAGCTGAAGTGAAAAAGCCTGGCTCCTCCGTG |
| | | AAAGTGTCTTGTAAAGCCAGCGGCGGCACATTCTCA |
| | | TCCTACGCCATCAGCTGGGTGCGGCAGGCTCCAGGC |
| | | CAGGGACTGGAATGGATGGGAGGAATTATCCCTATT |
| | | TTTGGGACAGCCAATTATGCTCAGAAATTTCAGGGG |
| | | CGCGTGACAATTACAGCCGACAAGTCCACCTCTACA |
| | | GCTTATATGGAACTGTCCTCCCTGCGCTCCGAGGAT |
| | | ACAGCTGTGTATTACTGCGCCCGGTCCACACTGATC |
| | | TATGGATACTTTGATTATTGGGGGCAGGGAACAACA |
| | | GTGACTGTGTCCTCCGCTAGCACCAAGGGCCCATCG |
| | | GTCTTCCCCCTGGCACCCTCCTCCAAGAGCACCTCTG |
| | | GGGGCACAGCGGCCCTGGGCTGCCTGGTCAAGGACT |
| | | ACTTCCCCGAACCGGTGACGGTGTCGTGGAACTCAG |
| | | GCGCCCTGACCAGCGGCGTGCACACCTTCCCGGCTG |
| | | TCCTACAGTCCTCAGGACTCTACTCCCTCAGCAGCGT |
| | | GGTGACCGTGCCCTCCAGCAGCTTGGGCACCCAGAC |
| | | CTACATCTGCAACGTGAATCACAAGCCCAGCAACAC |
| | | CAAGGTGGACAAGAAAGTTGAGCCCAAATCTTGTGA |
| | | CAAAACTCACACATGCCCACCGTGCCCAGCACCTGA |
| | | AGCTGCAGGGGGACCGTCAGTCTTCCTCTTCCCCCC |
| | | AAAACCCAAGGACACCCTCATGATCTCCCGGACCCC |
| | | TGAGGTCACATGCGTGGTGGTGGACGTGAGCCACGA |
| | | AGACCCTGAGGTCAAGTTCAACTGGTACGTGGACGG |
| | | CGTGGAGGTGCATAATGCCAAGACAAAGCCGCGGG |
| | | AGGAGCAGTACAACAGCACGTACCGTGTGGTCAGC |
| | | GTCCTCACCGTCCTGCACCAGGACTGGCTGAATGGC |
| | | AAGGAGTACAAGTGCAAGGTCTCCAACAAAGCCCTC |
| | | GGCGCCCCCATCGAGAAAACCATCTCCAAAGCCAAA |
| | | GGGCAGCCCCGAGAACCACAGGTGTGCACCCTGCCC |
| | | CCATCCCGGGATGAGCTGACCAAGAACCAGGTCAGC |
| | | CTCTCGTGCGCAGTCAAAGGCTTCTATCCCAGCGAC |
| | | ATCGCCGTGGAGTGGGAGAGCAATGGGCAGCCGGA |
| | | GAACAACTACAAGACCACGCCTCCCGTGCTGGACTC |
| | | CGACGGCTCCTTCTTCCTCGTGAGCAAGCTCACCGT |
| | | GGACAAGAGCAGGTGGCAGCAGGGGAACGTCTTCT |
| | | CATGCTCCGTGATGCATGAGGCTCTGCACAACCACT |
| | | ACACGCAGAAGAGCCTCTCCCTGTCTCCGGGTGGAG |
| | | GCGGCGGAAGCGGAGGAGGAGGATCCGGCGGCGGA |
| | | GGTTCCGGAGGCGGAGGATCCGAGGTGCAGCTGCTC |
| | | GAAAGCGGCGGAGGACTGGTGCAGCCTGGCGGCAG |
| | | CCTGAGACTGTCTTGCGCCGCCAGCGGCTTCACCTTC |
| | | AGCAGCTACGCCATGAGCTGGGTCCGCCAGGCCCCT |
| | | GGCAAGGGACTGGAATGGGTGTCCGCCATCATCGGC |
| | | TCTGGCGCCAGCACCTACTACGCCGACAGCGTGAAG |
| | | GGCCGGTTCACCATCAGCCGGGACAACAGCAAGAA |
| | | CACCCTGTACCTGCAGATGAACAGCCTGCGGGCCGA |
| | | GGACACCGCCGTGTACTACTGCGCCAAGGGATGGTT |
| | | CGGCGGCTTCAACTACTGGGGACAGGGCACCCTGGT |
| | | CACCGTGTCCAGC |
| 297 | (11D5) VLCL-light | see Table 48 |
| | chain | |
| 351 | HC 1 | QVQLVQSGAEVKKPGSSVKVSCKASGGTFSSYAISWV |
| | (11D5) | RQAPGQGLEWMGGIIPIFGTANYAQKFQGRVTITADKS |
| | VHCH1_VHCH1 Fc | TSTAYMELSSLRSEDTAVYYCARSTLIYGYFDYWGQG |
| | knob VL (4B9) | TTVTVSSASTKGPSVFPLAPSSKSTSGGTAALGCLVKD |
| | | YFPEPVTVSWNSGALTSGVHTFPAVLQSSGLYSLSSVV |
| | | TVPSSSLGTQTYICNVNHKPSNTKVDKKVEPKSCDGG |
| | | GGSGGGGSQVQLVQSGAEVKKPGSSVKVSCKASGGTF |
| | | SSYAISWVRQAPGQGLEWMGGIIPIFGTANYAQKFQGR |
| | | VTITADKSTSTAYMELSSLRSEDTAVYYCARSTLIYGY |
| | | FDYWGQGTTVTVSSASTKGPSVFPLAPSSKSTSGGTAA |
| | | LGCLVKDYFPEPVTVSWNSGALTSGVHTFPAVLQSSG |
| | | LYSLSSVVTVPSSSLGTQTYICNVNHKPSNTKVDKKVE |
| | | PKSCDKTHTCPPCPAPEAAGGPSVFLFPPKPKDTLMISR |
| | | TPEVTCVVVDVSHEDPEVKFNWYVDGVEVHNAKTKP |
| | | REEQYNSTYRVVSVLTVLHQDWLNGKEYKCKVSNKA |
| | | LGAPIEKTISKAKGQPREPQVYTLPPCRDELTKNQVSL |
| | | WCLVKGFYPSDIAVEWESNGQPENNYKTTPPVLDSDG |
| | | SFFLYSKLTVDKSRWQQGNVFSCSVMHEALHNHYTQ |
| | | KSLSLSPGGGGGSGGGGSGGGGSGGGGSEIVLTQSPGT |
| | | LSLSPGERATLSCRASQSVTSSYLAWYQQKPGQAPRLL |
| | | INVGSRRATGIPDRFSGSGSGTDFTLTISRLEPEDFAVY |
| | | YCQQGIMLPPTFGQGTKVEIK |
| 352 | HC 2 | QVQLVQSGAEVKKPGSSVKVSCKASGGTFSSYAISWV |
| | (11D5) | RQAPGQGLEWMGGIIPIFGTANYAQKFQGRVTITADKS |
| | VHCH1_VHCH1 Fc | TSTAYMELSSLRSEDTAVYYCARSTLIYGYFDYWGQG |
| | hole VH (4B9) | TTVTVSSASTKGPSVFPLAPSSKSTSGGTAALGCLVKD |
| | | YFPEPVTVSWNSGALTSGVHTFPAVLQSSGLYSLSSVV |
| | | TVPSSSLGTQTYICNVNHKPSNTKVDKKVEPKSCDGG |
| | | GGSGGGGSQVQLVQSGAEVKKPGSSVKVSCKASGGTF |
| | | SSYAISWVRQAPGQGLEWMGGIIPIFGTANYAQKFQGR |
| | | VTITADKSTSTAYMELSSLRSEDTAVYYCARSTLIYGY |
| | | FDYWGQGTTVTVSSASTKGPSVFPLAPSSKSTSGGTAA |
| | | LGCLVKDYFPEPVTVSWNSGALTSGVHTFPAVLQSSG |
| | | LYSLSSVVTVPSSSLGTQTYICNVNHKPSNTKVDKKVE |
| | | PKSCDKTHTCPPCPAPEAAGGPSVFLFPPKPKDTLMISR |
| | | TPEVTCVVVDVSHEDPEVKFNWYVDGVEVHNAKTKP |
| | | REEQYNSTYRVVSVLTVLHQDWLNGKEYKCKVSNKA |
| | | LGAPIEKTISKAKGQPREPQVCTLPPSRDELTKNQVSLS |
| | | CAVKGFYPSDIAVEWESNGQPENNYKTTPPVLDSDGSF |
| | | FLVSKLTVDKSRWQQGNVFSCSVMHEALHNHYTQKS |
| | | LSLSPGGGGGSGGGGSGGGGSGGGGSEVQLLESGGGL |
| | | VQPGGSLRLSCAASGFTFSSYAMSWVRQAPGKGLEW |
| | | VSAIIGSGASTYYADSVKGRFTISRDNSKNTLYLQMNS |
| | | LRAEDTAVYYCAKGWFGGFNYWGQGTLVTVSS |
| 301 | (9B11) VLCL-light | see Table 48 |
| | chain | |
| | (nucleotide sequence) | |
| 353 | HC 1 | CAGGTGCAATTGGTGCAGTCTGGGGCTGAGGTGAAG |
| | (9B11) | AAGCCTGGGTCCTCGGTGAAGGTCTCCTGCAAGGCC |
| | VHCH1_VHCH1 Fc | TCCGGAGGCACATTCAGCAGCTACGCTATAAGCTGG |
| | knob VL (4B9) | GTGCGACAGGCCCCTGGACAAGGGCTCGAGTGGAT |
| | (nucleotide sequence) | GGGAGGGATCATCCCTATCTTTGGTACAGCAAACTA |
| | | CGCACAGAAGTTCCAGGGCAGGGTCACCATTACTGC |
| | | AGACAAATCCACGAGCACAGCCTACATGGAGCTGA |
| | | GCAGCCTGAGATCTGAGGACACCGCCGTGTATTACT |
| | | GTGCGAGATCTTCTGGTGCTTACCCGGGTTACTTCGA |
| | | CTACTGGGGCCAAGGGACCACCGTGACCGTCTCCTC |
| | | AGCTTCTACCAAGGGCCCCAGCGTGTTCCCTCTGGC |
| | | CCCTAGCAGCAAGAGCACATCTGGCGGAACAGCCG |
| | | CCCTGGGCTGCCTCGTGAAGGACTACTTTCCCGAGC |
| | | CCGTGACAGTGTCCTGGAACTCTGGCGCCCTGACAA |
| | | GCGGCGTGCACACCTTTCCAGCCGTGCTGCAGAGCA |
| | | GCGGCCTGTACTCTCTGAGCAGCGTCGTGACTGTGC |
| | | CCAGCAGCAGCCTGGGAACCCAGACCTACATCTGCA |
| | | ACGTGAACCACAAGCCCAGCAACACCAAGGTGGAC |
| | | AAGAAGGTGGAACCCAAGAGCTGCGACGGCGGAGG |
| | | CGGATCTGGCGGCGGAGGATCCCAGGTGCAATTGGT |
| | | GCAGTCTGGGGCTGAGGTGAAGAAGCCTGGGTCCTC |
| | | GGTGAAGGTCTCCTGCAAGGCCTCCGGAGGCACATT |
| | | CAGCAGCTACGCTATAAGCTGGGTGCGACAGGCCCC |
| | | TGGACAAGGGCTCGAGTGGATGGGAGGGATCATCC |
| | | CTATCTTTGGTACAGCAAACTACGCACAGAAGTTCC |
| | | AGGGCAGGGTCACCATTACTGCAGACAAATCCACGA |
| | | GCACAGCCTACATGGAGCTGAGCAGCCTGAGATCTG |
| | | AGGACACCGCCGTGTATTACTGTGCGAGATCTTCTG |
| | | GTGCTTACCCGGGTTACTTCGACTACTGGGGCCAAG |
| | | GGACCACCGTGACCGTCTCCTCAGCTAGCACCAAGG |
| | | GCCCATCGGTCTTCCCCCTGGCACCCTCCTCCAAGA |
| | | GCACCTCTGGGGGCACAGCGGCCCTGGGCTGCCTGG |
| | | TCAAGGACTACTTCCCCGAACCGGTGACGGTGTCGT |
| | | GGAACTCAGGCGCCCTGACCAGCGGCGTGCACACCT |
| | | TCCCGGCTGTCCTACAGTCCTCAGGACTCTACTCCCT |
| | | CAGCAGCGTGGTGACCGTGCCCTCCAGCAGCTTGGG |
| | | CACCCAGACCTACATCTGCAACGTGAATCACAAGCC |
| | | CAGCAACACCAAGGTGGACAAGAAAGTTGAGCCCA |
| | | AATCTTGTGACAAAACTCACACATGCCCACCGTGCC |
| | | CAGCACCTGAAGCTGCAGGGGGACCGTCAGTCTTCC |
| | | TCTTCCCCCCAAAACCCAAGGACACCCTCATGATCT |
| | | CCCGGACCCCTGAGGTCACATGCGTGGTGGTGGACG |
| | | TGAGCCACGAAGACCCTGAGGTCAAGTTCAACTGGT |
| | | ACGTGGACGGCGTGGAGGTGCATAATGCCAAGACA |
| | | AAGCCGCGGGAGGAGCAGTACAACAGCACGTACCG |
| | | TGTGGTCAGCGTCCTCACCGTCCTGCACCAGGACTG |
| | | GCTGAATGGCAAGGAGTACAAGTGCAAGGTCTCCA |
| | | ACAAAGCCCTCGGCGCCCCCATCGAGAAAACCATCT |
| | | CCAAAGCCAAAGGGCAGCCCCGAGAACCACAGGTG |
| | | TACACCCTGCCCCCCTGCAGAGATGAGCTGACCAAG |
| | | AACCAGGTGTCCCTGTGGTGTCTGGTCAAGGGCTTC |
| | | TACCCCAGCGATATCGCCGTGGAGTGGGAGAGCAAC |
| | | GGCCAGCCTGAGAACAACTACAAGACCACCCCCCCT |
| | | GTGCTGGACAGCGACGGCAGCTTCTTCCTGTACTCC |
| | | AAACTGACCGTGGACAAGAGCCGGTGGCAGCAGGG |
| | | CAACGTGTTCAGCTGCAGCGTGATGCACGAGGCCCT |
| | | GCACAACCACTACACCCAGAAGTCCCTGAGCCTGAG |
| | | CCCCGGCGGAGGCGGCGGAAGCGGAGGAGGAGGAT |
| | | CTGGGGGCGGAGGTTCCGGAGGCGGTGGATCTGAG |
| | | ATCGTGCTGACCCAGTCTCCCGGCACCCTGTCTCTGA |
| | | GCCCTGGCGAGAGAGCCACCCTGTCCTGCAGAGCCT |
| | | CCCAGTCCGTGACCTCCTCCTACCTCGCCTGGTATCA |
| | | GCAGAAGCCCGGCCAGGCCCCTCGGCTGCTGATCAA |
| | | CGTGGGCAGTCGGAGAGCCACCGGCATCCCTGACCG |
| | | GTTCTCCGGCTCTGGCTCCGGCACCGACTTCACCCTG |
| | | ACCATCTCCCGGCTGGAACCCGAGGACTTCGCCGTG |
| | | TACTACTGCCAGCAGGGCATCATGCTGCCCCCCACC |
| | | TTTGGCCAGGGCACCAAGGTGGAAATCAAG |
| 354 | HC 2 | CAGGTGCAATTGGTGCAGTCTGGGGCTGAGGTGAAG |
| | (9B11) | AAGCCTGGGTCCTCGGTGAAGGTCTCCTGCAAGGCC |
| | VHCH1_VHCH1 Fc | TCCGGAGGCACATTCAGCAGCTACGCTATAAGCTGG |
| | hole VH (4B9) | GTGCGACAGGCCCCTGGACAAGGGCTCGAGTGGAT |
| | (nucleotide sequence) | GGGAGGGATCATCCCTATCTTTGGTACAGCAAACTA |
| | | CGCACAGAAGTTCCAGGGCAGGGTCACCATTACTGC |
| | | AGACAAATCCACGAGCACAGCCTACATGGAGCTGA |
| | | GCAGCCTGAGATCTGAGGACACCGCCGTGTATTACT |
| | | GTGCGAGATCTTCTGGTGCTTACCCGGGTTACTTCGA |
| | | CTACTGGGGCCAAGGGACCACCGTGACCGTCTCCTC |
| | | AGCTTCTACCAAGGGCCCCAGCGTGTTCCCTCTGGC |
| | | CCCTAGCAGCAAGAGCACATCTGGCGGAACAGCCG |
| | | CCCTGGGCTGCCTCGTGAAGGACTACTTTCCCGAGC |
| | | CCGTGACAGTGTCCTGGAACTCTGGCGCCCTGACAA |
| | | GCGGCGTGCACACCTTTCCAGCCGTGCTGCAGAGCA |
| | | GCGGCCTGTACTCTCTGAGCAGCGTCGTGACTGTGC |
| | | CCAGCAGCAGCCTGGGAACCCAGACCTACATCTGCA |
| | | ACGTGAACCACAAGCCCAGCAACACCAAGGTGGAC |
| | | AAGAAGGTGGAACCCAAGAGCTGCGACGGCGGAGG |
| | | CGGATCTGGCGGCGGAGGATCCCAGGTGCAATTGGT |
| | | GCAGTCTGGGGCTGAGGTGAAGAAGCCTGGGTCCTC |
| | | GGTGAAGGTCTCCTGCAAGGCCTCCGGAGGCACATT |
| | | CAGCAGCTACGCTATAAGCTGGGTGCGACAGGCCCC |
| | | TGGACAAGGGCTCGAGTGGATGGGAGGGATCATCC |
| | | CTATCTTTGGTACAGCAAACTACGCACAGAAGTTCC |
| | | AGGGCAGGGTCACCATTACTGCAGACAAATCCACGA |
| | | GCACAGCCTACATGGAGCTGAGCAGCCTGAGATCTG |
| | | AGGACACCGCCGTGTATTACTGTGCGAGATCTTCTG |
| | | GTGCTTACCCGGGTTACTTCGACTACTGGGGCCAAG |
| | | GGACCACCGTGACCGTCTCCTCAGCTAGCACCAAGG |
| | | GCCCATCGGTCTTCCCCCTGGCACCCTCCTCCAAGA |
| | | GCACCTCTGGGGGCACAGCGGCCCTGGGCTGCCTGG |
| | | TCAAGGACTACTTCCCCGAACCGGTGACGGTGTCGT |
| | | GGAACTCAGGCGCCCTGACCAGCGGCGTGCACACCT |
| | | TCCCGGCTGTCCTACAGTCCTCAGGACTCTACTCCCT |
| | | CAGCAGCGTGGTGACCGTGCCCTCCAGCAGCTTGGG |
| | | CACCCAGACCTACATCTGCAACGTGAATCACAAGCC |
| | | CAGCAACACCAAGGTGGACAAGAAAGTTGAGCCCA |
| | | AATCTTGTGACAAAACTCACACATGCCCACCGTGCC |
| | | CAGCACCTGAAGCTGCAGGGGGACCGTCAGTCTTCC |
| | | TCTTCCCCCCAAAACCCAAGGACACCCTCATGATCT |
| | | CCCGGACCCCTGAGGTCACATGCGTGGTGGTGGACG |
| | | TGAGCCACGAAGACCCTGAGGTCAAGTTCAACTGGT |
| | | ACGTGGACGGCGTGGAGGTGCATAATGCCAAGACA |
| | | AAGCCGCGGGAGGAGCAGTACAACAGCACGTACCG |
| | | TGTGGTCAGCGTCCTCACCGTCCTGCACCAGGACTG |
| | | GCTGAATGGCAAGGAGTACAAGTGCAAGGTCTCCA |
| | | ACAAAGCCCTCGGCGCCCCCATCGAGAAAACCATCT |
| | | CCAAAGCCAAAGGGCAGCCCCGAGAACCACAGGTG |
| | | TGCACCCTGCCCCCATCCCGGGATGAGCTGACCAAG |
| | | AACCAGGTCAGCCTCTCGTGCGCAGTCAAAGGCTTC |
| | | TATCCCAGCGACATCGCCGTGGAGTGGGAGAGCAAT |
| | | GGGCAGCCGGAGAACAACTACAAGACCACGCCTCC |
| | | CGTGCTGGACTCCGACGGCTCCTTCTTCCTCGTGAGC |
| | | AAGCTCACCGTGGACAAGAGCAGGTGGCAGCAGGG |
| | | GAACGTCTTCTCATGCTCCGTGATGCATGAGGCTCT |
| | | GCACAACCACTACACGCAGAAGAGCCTCTCCCTGTC |
| | | TCCGGGTGGAGGCGGCGGAAGCGGAGGAGGAGGAT |
| | | CCGGCGGCGGAGGTTCCGGAGGCGGAGGATCCGAG |
| | | GTGCAGCTGCTCGAAAGCGGCGGAGGACTGGTGCA |
| | | GCCTGGCGGCAGCCTGAGACTGTCTTGCGCCGCCAG |
| | | CGGCTTCACCTTCAGCAGCTACGCCATGAGCTGGGT |
| | | CCGCCAGGCCCCTGGCAAGGGACTGGAATGGGTGTC |
| | | CGCCATCATCGGCTCTGGCGCCAGCACCTACTACGC |
| | | CGACAGCGTGAAGGGCCGGTTCACCATCAGCCGGG |
| | | ACAACAGCAAGAACACCCTGTACCTGCAGATGAAC |
| | | AGCCTGCGGGCCGAGGACACCGCCGTGTACTACTGC |
| | | GCCAAGGGATGGTTCGGCGGCTTCAACTACTGGGGA |
| | | CAGGGCACCCTGGTCACCGTGTCCAGC |
| 301 | (9B11) VLCL-light | see Table 48 |
| | chain | |
| 355 | HC 1 | QVQLVQSGAEVKKPGSSVKVSCKASGGTFSSYAISWV |
| | (9B11) | RQAPGQGLEWMGGIIPIFGTANYAQKFQGRVTITADKS |
| | VHCH1_VHCH1 Fc | TSTAYMELSSLRSEDTAVYYCARSSGAYPGYFDYWGQ |
| | knob VL (4B9) | GTTVTVSSASTKGPSVFPLAPSSKSTSGGTAALGCLVK |
| | | DYFPEPVTVSWNSGALTSGVHTFPAVLQSSGLYSLSSV |
| | | VTVPSSSLGTQTYICNVNHKPSNTKVDKKVEPKSCDG |
| | | GGGSGGGGSQVQLVQSGAEVKKPGSSVKVSCKASGG |
| | | TFSSYAISWVRQAPGQGLEWMGGIIPIFGTANYAQKFQ |
| | | GRVTITADKSTSTAYMELSSLRSEDTAVYYCARSSGAY |
| | | PGYFDYWGQGTTVTVSSASTKGPSVFPLAPSSKSTSGG |
| | | TAALGCLVKDYFPEPVTVSWNSGALTSGVHTFPAVLQ |
| | | SSGLYSLSSVVTVPSSSLGTQTYICNVNHKPSNTKVDK |
| | | KVEPKSCDKTHTCPPCPAPEAAGGPSVFLFPPKPKDTL |
| | | MISRTPEVTCVVVDVSHEDPEVKFNWYVDGVEVHNA |
| | | KTKPREEQYNSTYRVVSVLTVLHQDWLNGKEYKCKV |
| | | SNKALGAPIEKTISKAKGQPREPQVYTLPPCRDELTKN |
| | | QVSLWCLVKGFYPSDIAVEWESNGQPENNYKTTPPVL |
| | | DSDGSFFLYSKLTVDKSRWQQGNVFSCSVMHEALHN |
| | | HYTQKSLSLSPGGGGGSGGGGSGGGGSGGGGSEIVLT |
| | | QSPGTLSLSPGERATLSGRASQSVTSSYLAWYQQKPGQ |
| | | APRLLINVGSRRATGIPDRFSGSGSGTDFTLTISRLEPED |
| | | FAVYYCQQGIMLPPTFGQGTKVEIK |
| 356 | HC 2 | QVQLVQSGAEVKKPGSSVKVSCKASGGTFSSYAISWV |
| | (9B11) | RQAPGQGLEWMGGIIPIFGTANYAQKFQGRVTITADKS |
| | VHCH1_VHCH1 Fc | TSTAYMELSSLRSEDTAVYYCARSSGAYPGYFDYWGQ |
| | hole VH (4B9) | GTTVTVSSASTKGPSVFPLAPSSKSTSGGTAALGCLVK |
| | | DYFPEPVTVSWNSGALTSGVHTFPAVLQSSGLYSLSSV |
| | | VTVPSSSLGTQTYICNVNHKPSNTKVDKKVEPKSCDG |
| | | GGGSGGGGSQVQLVQSGAEVKKPGSSVKVSCKASGG |
| | | TFSSYAISWVRQAPGQGLEWMGGIIPIFGTANYAQKFQ |
| | | GRVTITADKSTSTAYMELSSLRSEDTAVYYCARSSGAY |
| | | PGYFDYWGQGTTVTVSSASTKGPSVFPLAPSSKSTSGG |
| | | TAALGCLVKDYFPEPVTVSWNSGALTSGVHTFPAVLQ |
| | | SSGLYSLSSWTVPSSSLGTQTYICNVNHKPSNTKVDK |
| | | KVEPKSCDKTHTCPPCPAPEAAGGPSVFLFPPKPKDTL |
| | | MISRTPEVTCVVVDVSHEDPEVKFNWYVDGVEVHNA |
| | | KTKPREEQYNSTYRVVSVLTVLHQDWLNGKEYKCKV |
| | | SNKALGAPIEKTISKAKGQPREPQVCTLPPSRDELTKNQ |
| | | VSLSCAVKGFYPSDIAVEWESNGQPENNYKTTPPVLDS |
| | | DGSFFLVSKLTVDKSRWQQGNVFSCSVMHEALHNHY |
| | | TQKSLSLSPGGGGGSGGGGSGGGGSGGGGSEVQLLES |
| | | GGGLVQPGGSLRLSCAASGFTFSSYAMSWVRQAPGKG |
| | | LEWVSAIIGSGASTYYADSVKGRFTISRDNSKNTLYLQ |
| | | MNSLRAEDTAVYYCAKGWFGGFNYWGQGTLVTVSS |

TABLE 67
Biochemical analysis of exemplary bispecific, tetravalent
anti-4-1BB/anti-FAP IgG1 P329G LALA antigen binding
molecules (4 + 1 constructs)

| | Yield | Monomer | CE-SDS |
|---|---|---|---|
| Clone | [mg/l] | [%] | (nonred) |
| 4 + 1 2B3/FAP (hole-VL) | 0.7 | 97 | 96 |
| 4 + 1 25G7/FAP (hole-VH) | 10 | 95 | 90 |
| 4 + 1 11D5/FAP (hole-VH) | 0.4 | 94 | 95 |

### 9.6 Characterization of Bispecific Tetravalent Antibodies Targeting 4-1BB and Fibroblast Activation Protein (FAP)

### 9.6.1 Surface Plasmon Resonance (Simultaneous Binding)

[0922] The capacity of binding simultaneously human 4-1BB Fc(kih) and human FAP was assessed by surface plasmon resonance (SPR). All SPR experiments were performed on a Biacore T200 at 25° C. with HBS-EP as running buffer (0.01 M HEPES pH 7.4, 0.15 M NaCl, 3 mM EDTA, 0.005% Surfactant P20, Biacore, Freiburg/Germany).

[0923] Biotinylated human 4-1BB Fc(kih) was directly coupled to a flow cell of a streptavidin (SA) sensor chip. Immobilization levels up to 400 resonance units (RU) were used. The bispecific antibodies targeting 4-1BB and FAP were passed at a concentration range of 200 nM with a flow of 30 μL/minute through the flow cells over 90 seconds and dissociation was set to zero sec. Human FAP was injected as second analyte with a flow of 30 μL/minute through the flow cells over 90 seconds at a concentration of 500 nM. The dissociation was monitored for 120 sec. Bulk refractive index differences were corrected for by subtracting the response obtained in a reference flow cell, where no protein was immobilized.

[0924] All bispecific constructs could bind simultaneously to human 4-1BB and human FAP as shown in FIGS. 41A, 41B, 41C, and 41D.

### 9.6.2 Binding to Human 4-1BB—Competition Assay of Bivalent 4-1BB Antibody Vs Tetravalent Anti-4-1BB Antigen Binding Molecules

[0925] To confirm the ability of all four anti-4-1BB Fab domains to bind to human 4-1BB, a cell-based FRET assay (TagLite) was applied. Therefore, 2500 Hek293 EBNA cells/well transfected with a hu4-1BB-SNAP fusion protein and labeled with the FRET donor Terbium (Cisbio) were mixed with either 0.6 nM anti-4-1BB Urelumab or 0.39 nM anti-4-1BB 12B3 labeled with the FRET acceptor d2 (Cisbio). Additionally, a concentration dilution ranging from 0.006-1000 nM of the unlabeled IgG (12B3) or tetravalent (12B3/4B9 4+1) bispecific antibody was added and incubated for 2 to 4 hours at RT. The fluorescent signal was measured at 620 nm for the fluorescent donor (Terbium) and at 665 nm for the fluorescent acceptor dye (M100 Pro, Tecan). The ratio of 665/620*1000 was calculated, and the reference (cells only) was subtracted. For EC₅₀ determination the results were analysed in Graph Pad Prism6. The observed EC₅₀ values after 4 hour incubation are shown in Table 68. The corresponding curves are shown in FIG. 42.

TABLE 68
EC₅₀ values for competitive binding of
bivalent vs tetravalent 4-1BB binding molecules

| Construct | EC₅₀ (nM) |
|---|---|
| 12B3 IgG | 1.4 (0.9-2.1) |
| 4-1BB(12B3)/ | 0.3 (0.2-0.4) |
| FAP(4B9) 4 + 1 | |

### 9.6.3 Binding on Cells

### 9.6.3.1 Binding on Human 4-1BB Expressing Cells: Resting and Activated Human Peripheral Mononuclear Blood Leukocytes (PBMC)

[0926] Expression of human 4-1BB is absent on resting (naïve) human T cells (Kienzle G. and von Kempis J (2000), Int. Immunol. 12(1), 73-82, Wen T. et al. (2002), J. Immunol. 168, 4897-4906). After activation with immobilized anti-human CD3 agonistic antibody, 4-1BB is upregulated on CD4⁺ and CD8⁺ T cells. 4-1BB expression has also been reported on activated human NK cells (Baessler T. et. al. (2010) Blood 115(15), 3058-3069), activated human NKT cells (Cole S. L. et al. (2014) J. Immunol. 192(8), 3898-3907), activated human B cells (Zhang et al. (2010) J. Immunol. 184(2), 787-795), activated human eosinophils (Heinisch et al. 2001), constitutively on human neutrophils (Heinisch I. V. (2000) J Allergy Clin Immunol. 108(1), 21-28), activated human monocytes (Langstein J. et al. (1998) J Immunol. 160(5), 2488-2494, Kwajah M. and Schwarz H. (2010) Eur J Immunol. 40(7), 1938-1949), constitutively on human regulatory T cells (Bacher P. et al. (2014) Mucosal Immunol. 7(4), 916-928), human follicular dendritic cells (Pauly S. et al. (2002) J Leukoc Biol. 72(1), 35-42), activated human dendritic cells (Zhang L. et al. (2004) Cell Mol Immunol. 1(1), 71-76) and on blood vessels of malignant human tumors (Broll K. et al. (2001) Am J Clin Pathol. 115(4), 543-549).

[0927] To test binding of our anti-4-1BB clones to naturally cell-expressed human 4-1BB, resting peripheral blood mononuclear cells (PBMCs) or PHA-L/Proleukin pre-activated and CD3/CD28-reactivated PBMC were used. PBMCs from buffy coats obtained from the Zurich blood donation center were isolated by ficoll density centrifugation using Histopaque 1077 (SIGMA Life Science, Cat.-No. 10771, polysucrose and sodium diatrizoate, adjusted to a density of 1.077 g/mL) and resuspended in T cell medium consisting of RPMI 1640 medium (Gibco by Life Technology, Cat.-No. 42401-042) supplied with 10% Fetal Bovine Serum (FBS, Gibco by Life Technology, Cat.-No. 16000-044, Lot 941273, gamma-irradiated, mycoplasma-free and heat inactivated at 56° C. for 35 min), 1% (v/v) GlutaMAX-I (GIBCO by Life Technologies, Cat.-No. 35050 038), 1 mM Sodium Pyruvate (SIGMA, Cat.-No. S8636), 1% (v/v) MEM non-essential amino acids (SIGMA, Cat.-No. M7145) and 50 μM β-Mercaptoethanol (SIGMA, M3148). PBMCs were used directly after isolation (resting cells) or stimulated to induce 4-1BB expression at the cell surface of T cells by culturing for 3 to 5 days in T cell medium supplemented with 200 U/mL Proleukin (Novartis Pharma Schweiz AG, CHCLB-P-476-700-10340) and 2 μg/mL PHA-L (SIGMA Cat.-No. L2769) in a 6-well tissue culture plate and then 2 day in a 6-well tissue culture plate coated with 10 μg/mL anti-human CD3 (clone OKT3, BioLegend, Cat.-No. 317315) and 2 μg/mL anti-human CD28 (clone CD28.2, BioLegend, Cat.-No.: 302928) in T cell medium at 37° C. and 5% CO₂.

[0928] To determine binding to human 4-1BB expressed by human PBMCs, 0.1-0.2×10⁶ freshly isolated e.g. resting or activated PBMCs were added to each well of a round-bottom suspension cell 96-well plates (Greiner bio-one, cellstar, Cat.-No. 650185). Plates were centrifuged 4 minutes with 400×g at 4° C. and supernatant was discarded. Cells were washed with 200 μL/well DPBS and then incubated for 30 min at 4° C. with 100 μL/mL DPBS containing 1:5000 diluted Fixable Viability Dye eFluor 660 (eBioscience, Cat.-No. 65-0864-18). Afterwards cells were washed once with 200 μL/well cold FACS buffer (DPBS supplied with 2% (v/v) FBS, 5 mM EDTA pH8 (Amresco, Cat. No. E177) and 7.5 mM sodium azide (Sigma-Aldrich S2002)). Next, 50 μL/well of 4° C. cold FACS buffer containing titrated anti-human 4-1BB binders were added and cells were incubated for 120 minutes at 4° C. Cells were washed four times with 200 μL/well 4° C. FACS buffer to remove onbound molecules. Afterwards cells were further incubated with 50 μL/well of 4° C. cold FACS buffer containing 2.5 μg/mL PE-conjugated AffiniPure anti-human IgG Fcγ-fragment-specific goat F(ab′)2 fragment (Jackson ImmunoResearch, Cat.-No. 109-116-098), anti-human CD45 AF488 (clone HI30, BioLegend, Cat.-No. 304019), 0.67 μg/mL PerCP/Cy5.5-conjugated anti-human CD3 mouse IgG1 κ (clone UCHT1, BioLegend, Cat.-No. 300430), 0.125 μg/mL BV421-conjugated anti-human CD4 moIgG1κ (clone RPA-T4, BioLegend, Cat.-No. 300532) or 0.23 μg/mL BV421-conjugated anti-human CD4 mouse IgG2b κ (clone OKT4, BioLegend, Cat.-No. 317434, 0.33 μg/mL anti-human CD8-BV510 (moIgG1K, clone SK1, BioLegend, Cat.-No. 344732) and 0.67 μg/mL anti-human CD19-PE/Cy7 (moIgG1K, clone HIB19, BioLegend, Cat.-No. 302216) and incubated for 30 minutes at 4° C.

[0929] Cells were washed twice with 200 μL FACS buffer/well and fixated by resuspending in 50 μL/well DPBS containing 1% Formaldehyde (Sigma, HT501320-9.5L). Cells were acquired the same or next day using 3-laser MACSQuant Analyzer 10 (Miltenyi Biotech). Gates were set on CD8⁺ and CD4⁺ T cells and the geo mean of fluorescence intensity (MFI) of the secondary detection antibody was used to analyze binding of primary antibodies. Using Graph Pad Prism (Graph Pad Software Inc.) data was baselined by subtracting the blank values (no primary antibody added) and the EC₅₀ values were calculated using non-linear regression curve fit (robust fit).

[0930] Human T cells lack 4-1BB expression in a resting status but upregulate 4-1BB after activation. Human CD8⁺ T cells show a stronger up-regulation than CD4⁺ T cells. The generated anti-human 4-1BB-specific antibodies can bind to human 4-1BB expressed by activated human T cells as shown in FIGS. 43B and 43D whereas on resting CD4 and CD8 T cells no significant binding can be detected (FIGS. 43A and 43C). Binding is influenced by the 4-1BB expression level of the cells, e.g. 4-1BB-specific molecules bind stronger to activated CD8⁺ T cells (FIG. 43D) than to activated CD4⁺ T cells (FIG. 43B). There is also a difference observed by the format of the molecules, e.g. monovalent 4-1BB-binders bind differently than bivalent or tetravalent 4-1BB antigen binding molecules. Monovalent 4-1BB-binding leads to an increase of the EC₅₀ value and decrease of MFI due to lower binding affinity, the tetravalent 4-1BB-binders may show a different binding curve because of stronger affinity but also due to internal competition for 4-1BB-specific epitope. Molecules containing Fc-fused FAP-targeting domains (e.g. FAP-targeted 2+2 or 4+1 but not 1+1 formats) may mask epitopes of the polyclonal secondary detection antibody which could influence the MFI and EC₅₀ values. The EC₅₀ values of binding to activated CD8⁺ T cells are shown in Table 69. In FIG. 44 the area under the curve (AUC) of binding curves shown in FIGS. 43A, 43B, 43C, and 43D are summarized.

TABLE 69
EC₅₀ values of binding to activated human CD8⁺ T cells

| Clone | EC₅₀ [nM] |
|---|---|
| 12B3 IgG | 0.4 |
| 4-1BB(12B3)/ | 8 |
| FAP(4B9) 1 + 1 | |
| 4-1BB(12B3)/ | 2 |
| FAP(4B9) 2 + 2 | |
| 4-1BB(12B3)/ | n.d. (plateau not reached) |
| FAP(4B9) 4 + 1 | |

### 9.6.3.2 Binding to Human FAP-Expressing Tumor Cells

[0931] For binding to cell-surface-expressed human Fibroblast Activation Protein (FAP) NIH/3T3-huFAP clone 19 cells or human melanoma cell line WM-266-4 (ATCC CRL-1676) were used. NIH/3T3-huFAP clone 19 was generated by transfection of mouse embryonic fibroblast NIH/3T3 cells (ATCC CRL-1658) with the expression pETR4921 plasmid encoding human FAP under a CMV promoter. Cells were maintained in the presence of 1.5 μg/mL puromycin (InvivoGen, Cat.-No.: ant-pr-5). 2×10⁵ of FAP expressing tumor cells were added to each well of a round-bottom suspension cell 96-well plates (Greiner bio-one, cellstar, Cat.-No. 650185). Cells were washed once with 200 μL DPBS and pellets were resuspended in 100 μL/well of 4° C. cold DPBS buffer containing 1:5000 diluted Fixable Viability Dye eFluor 450 (eBioscience, Cat. No. 65 0863 18) or Fixable Viability Dye eFluor 660 (eBioscience, Cat.-No. 65-0864-18). Plates were incubated for 30 minutes at 4° C. and washed once with 200 μL 4° C. cold DPBS buffer. Afterwards cells were resuspended in 50 μL/well of 4° C. cold FACS buffer containing different titrated concentrations of 4-1BB-specific FAP-targeted and non-targeted antibodies, followed by incubation for 1 hour at 4° C. After washing four times with 200 μL/well, cells were stained with 50 μL/well of 4° C. cold FACS buffer containing 2.5 μg/mL PE-conjugated AffiniPure anti-human IgG Fcγ-fragment-specific goat F(ab′)2 fragment (Jackson ImmunoResearch, Cat.-No. 109-116-098) or 30 μg/mL FITC-conjugated AffiniPure anti-human IgG Fcγ-fragment-specific goat F(ab′)2 fragment (Jackson ImmunoResearch, Cat. No. 109 096 098) for 30 minutes at 4° C. Cells were washed twice with 200 μL 4° C. FACS buffer and then resuspended in 50 μL/well DPBS containing 1% Formaldehyde for fixation. The same or the next day cells were resuspended in 100 μL FACS-buffer and acquired using 5-laser LSR-Fortessa (BD Bioscience with DIVA software) or MACSQuant Analyzer 10 (Miltenyi Biotec).

[0932] As shown in FIGS. 45A and 45B, the FAP-targeted molecules, but not the DP47-targeted or parental huIgG1 P293G LALA clone 12B3 bind efficiently to human FAP-expressing WM-266-4 (A) and NIH/3T3-huFAP clone 19 cells (B). Therefore including a FAP-binding side induces an efficient targeting effect to human FAP-expressing cells. The moiety of FAP-binding sides (e.g. 1+1 or 2+2 or 4+1) as well as the FAP-binding clone (28H1 or 4B9) play a role and influence the EC₅₀ (Table 70) and AUC (FIG. 46) of binding to FAP-expressing cells. The 4-1BB (12B3)×FAP (28H1) 2+2 (black filled triangle), 4-1BB (12B3)×FAP (28H1) 1+1 (grey half-filled circle) and 4-1BB (12B3)×FAP (4B9) 4+1 (grey half-filled square) show differences in binding (FIG. 45B) which may also influence their cross-linking and therefore also the activation potential (shown in FIGS. 47A, 47B, 47C, 47D, 47E, 47F, 47G, 47H, and 47I and discussed in Example 10).

TABLE 70
EC₅₀ values of binding to FAP expressing cell
line NIH/3T3-huFAP clone 19 and WM-266-4

| | EC₅₀ [nM] with | |
|---|---|---|
| | NIH/3T3-huFAP clone | EC₅₀ [nM] with WM- |
| Clone | 19 cells | 266-4 cells |
| 12B3 IgG | n.d. | n.d. |
| 4-1BB(12B3)/ | 2.4 | 1.7 |
| FAP(4B9) 1 + 1 | | |
| 4-1BB(12B3)/ | 12.2 | n.d. (plateau not |
| FAP(4B9) 2 + 2 | | reached) |
| 4-1BB(12B3)/ | n.d. (plateau not | 9.4 |
| FAP(4B9) 4 + 1 | reached) | |

### Example 10

### Functional Properties of Bispecific Anti-Human 4-1BB Binding Molecules

### 10.1 NFκB Activation

### 10.1.1 Generation of HeLa Cells Expressing Human 4-1BB and NF-κB-Luciferase

[0933] The cervix carcinoma cell line HeLa (ATCC CCL-2) was transduced with a plasmid based on the expression vector pETR10829, which contains the sequence of human 4-1BB (Uniprot accession Q07011) under control of a CMV-promoter and a puromycin resistance gene. Cells were cultured in DMEM medium supplemented with 10% (v/v) FBS, 1% (v/v) GlutaMAX-I and 3 μg/mL puromycin.

[0934] 4-1BB-transduced HeLa cells were tested for 4-1BB expression by flow cytometry: 0.2×10⁶ living cells were resuspended in 100 μL FACS buffer containing 0.1 μg PerCP/Cy5.5 conjugated anti-human 4-1BB mouse IgG1K clone 4B4-1 (BioLegend Cat. No. 309814) or its isotype control (PerCP/Cy5.5 conjugated mouse IgG1K isotype control antibody clone MOPC 21, BioLegend Cat. No. 400150) and incubated for 30 minutes at 4° C. Cells were washed twice with FACS buffer, resuspended in 300 μL FACS buffer containing 0.06 μg DAPI (Santa Cruz Biotec, Cat. No. Sc-3598) and acquired using a 5-laser LSR-Fortessa (BD Bioscience, DIVA software). Limited dilutions were performed to generate single clones as described: human-4-1BB-transduced HeLa cells were resuspended in medium to a density of 10, 5 and 2.5 cells/ml and 200 μl of cell suspensions were transferred to round bottom tissue-culture treated 96-well plates (6 plates/cell concentration, TPP Cat. No. 92697). Single clones were harvested, expanded and tested for 4-1BB expression as described above. The clone with the highest expression of 4-1BB (clone 5) was chosen for subsequent transfection with the NF-κB-luciferase expression-vector 5495p Tranlucent HygB. The vector confers transfected cells both with resistance to Hygromycin B and capacity to express luciferase under control of NF-kB-response element (Panomics, Cat. No. LR0051). For transfection Human-4-1BB HeLa clone 5 cells were cultured to 70% confluence. 50 μg (40 μL) linearized (restriction enzymes AseI and SalI) 5495p Translucent HygB expression vector were added to a sterile 0.4 cm Gene Pulser/MicroPulser Cuvette (Biorad, Cat.-No, 165-2081). 2.5×10⁶ human-4-1BB HeLa clone 5 cells in 400 μl supplement-free DMEM medium were added and mixed carefully with the plasmid solution. Transfection of cells was performed using a Gene Pulser Xcell total system (Biorad, Cat No. 165 2660) under the following settings: exponential pulse, capacitance 500 ρF, voltage 160 V, resistance 00 Immediately after the pulse transfected cells were transferred to a 75 cm² tissue culture flask (TPP, Cat. No. 90075) with 15 mL 37° C. warm DMEM medium supplied with 10% (v/v) FBS and 1% (v/v) GlutaMAX I. On the next day, culture medium containing 3 μg/mL Puromycin and 200 μg/mL Hygromycin B (Roche, Cat. No. 10843555001) was added. Surviving cells were expanded and limited dilution was performed as described above to generate single clones.

[0935] Clones were tested for 4-1BB expression as described above and for NF-κB-Luciferase activity as following: Clones were harvested in selection medium and counted using a Cell Counter Vi-cell xr 2.03 (Beckman Coulter, Cat. No. 731050). Cells were set to a cell density of 0.33×10⁶ cells/mL and 150 μL of this cell suspension were transferred to each well of a sterile white 96-well flat bottom tissue culture plate with lid (greiner bio one, Cat. No. 655083). Cells were incubated at 37° C. and 5% CO₂ overnight in a cell incubator (Hera Cell). The next day 50 μL of medium containing different concentrations of recombinant human tumor necrosis factor alpha (rhTNFα, PeproTech, Cat.-No. 300 01A) were added to each well of a 96-well plate resulting in final concentration of rhTNFα of 100, 50, 25, 12.5, 6.25 and 0 ng/well. Cells were incubated for 6 hours at 37° C. and 5% CO₂ and then washed three times with 200 μL/well DPBS. Reporter Lysis Buffer (Promega, Cat-No: E3971) was added to each well (40 μl) and the plates were stored over night at −20° C. The next day frozen cell and Detection Buffer (Luciferase 1000 Assay System, Promega, Cat. No. E4550) were thawed to room temperature. 100 uL of detection buffer were added to each well and the plate was measured as fast as possible using a SpectraMax M5/M5e microplate reader and the SoftMax Pro Software (Molecular Devices). Measured units of released light for 500 ms/well (URLs) above control (no rhTNFα added) were taken as luciferase activity. The HeLa-hu4-1BB-NF-κB-luc clone 26 exhibiting the highest luciferase activity and a considerable level of 4-1BB-expression and was chosen for further use.

10.1.2 NFκB Activation in HeLa Cells Expressing Human 4-1BB Co-Cultured with FAP-Expressing Tumor Cells

[0936] HeLa-hu4-1BB-NF-κB-luc clone 26 cells were harvested and resuspended in DMEM medium supplied with 10% (v/v) FBS and 1% (v/v) GlutaMAX-I to a concentration of 0.2×10⁶ cells/ml. 100 μl (2×10⁴ cells) of this cell suspension were transferred to each well of a sterile white 96-well flat bottom tissue culture plate with lid (greiner bio one, Cat. No. 655083) and the plate were incubated at 37° C. and 5% CO₂ overnight. The next day 50 μL of medium containing titrated FAP-targeted anti-human 4-1BB constructs or their parental huIgG1 P329G LALA antibodies were added. FAP-expressing NIH/3T3-huFAP clone 19 or WM-266-4 were resuspended in DMEM medium supplied with 10% (v/v) FBS and 1% (v/v) GlutaMAX-I to a concentration of 2×10⁶ cells/ml.

[0937] Suspension of FAP-expressing tumor cell (50 μl) or medium as negative control was added to each well and plates were incubated for 6 hours at 37° C. and 5% CO₂ in the cell incubator. Cells were washed twice with 200 μL/well DPBS. 40 μl freshly prepared Reporter Lysis Buffer (Promega, Cat-No: E3971) were added to each well and the plate were stored over night at −20° C. The next day frozen cell plates and Detection Buffer (Luciferase 1000 Assay System, Promega, Cat. No. E4550) were thawed at room temperature. 100 μL of detection buffer were added to each well and luciferase activity was measured as fast as possible using a SpectraMax M5/M5e microplate reader and a SoftMax Pro Software (Molecular Devices).

[0938] In FIGS. 47A, 47B, 47C, 47D, 47E, 47F, 47G, 47H, and 47I the activation property of different FAP-targeted 4-1BB-specific constructs are shown. In the upper panels the activation property in the absence of FAP is shown (FIGS. 47A, D and G). In the absence of FAP no activation can be detected independent of the 4-1BB-binding clone. In the middle panels the activation in the presence of intermediate FAP-expressing human WM-266-4 is shown. Only in the presence of 4+1 and 2+1 FAP (4B9)-targeted constructs a NFκB-mediated luciferase activation can be observed; namely: 4-1BB (12B3)×FAP (4B9) 4+1 (half filled grey squares, half dotted line) in FIG. 47B, 4-1BB (11D5)×FAP (4B9) 4+1 (grey star, dotted line) and) and 4-1BB (11D5)×FAP (4B9) 2+1 (black cross, dotted line) in FIG. 47E as well as 4-1BB (25G7)×FAP (4B9) 4+1 (up-showing half filed black triangle, dotted line) and 4-1BB (25G7)×FAP (4B9) 2+1 (half filled down-showing black triangle) in FIG. 47H. In the lower panels the activation in the presence of high FAP-expressing NIH/3T3-huFAP clone 19 is shown. Here not only the 4+1 and 2+1 FAP (4B9)-targeted constructs but also the 2+2 and 1+1 FAP (28H1)-targeted constructs can induce a NFκB-mediated luciferase activation in the reporter cell line. These results are also summarized in FIGS. 48A and B as area under the curve (AUC) of the activation curves. The used formats and FAP-binding clones are indicated as pictograms below the graph, the used clones are indicated by the column pattern. Clearly the tetravalent 4-1BB×FAP 4+1 molecules induced the strongest NFkB/Luciferase-activation in the 4-1BB expressing reporter cell line.

TABLE 71
EC₅₀ values of activation of the NFκB signaling
pathway in the presence of FAP-expressing tumor cells

| | EC₅₀ [nM] with NIH/3T3- | EC₅₀ [nM] |
|---|---|---|
| Clone | huFAP clone 19 | with WM-266-4 |
| 12B3 IgG | n.d. | n.d. |
| 4-1BB(12B3)/ | 0.9 | n.d. |
| FAP(4B9) 1 + 1 | | |
| 4-1BB(12B3)/ | 0.2 | n.d. |
| FAP(4B9) 2 + 2 | | |
| 4-1BB(12B3)/ | 0.09 | 0.1 |
| FAP(4B9) 4 + 1 | | |
| 25G7 IgG | n.d. | n.d. |
| 4-1BB(25G7)/ | 3.2 | n.d. |
| FAP(28H1) 1 + 1 | | |
| 4-1BB(25G7)/ | 0.05 | n.d. |
| FAP(28H1) 2 + 2 | | |
| 4-1BB(25G7)/ | 0.1 | 0.3 |
| FAP(4B9) 2 + 1 | | |
| 4-1BB(25G7)/ | 0.04 | 0.2 |
| FAP(4B9) 4 + 1 | | |
| 11D5 IgG | n.d. | n.d. |
| 4-1BB(11D5)/ | 0.05 | n.d. |
| FAP(28H1) 2 + 2 | | |
| 4-1BB(11D5)/ | 0.3 | 0.4 |
| FAP(4B9) 2 + 1 | | |
| 4-1BB(11D5)/ | 0.06 | 0.1 |
| FAP(4B9) 4 + 1 | | |

### Example 11

### Generation of GITR Antibodies and Tool Binders

### 11.1 Preparation, Purification and Characterization of Antigens Fc Fusion as Screening Tools for the Generation of Novel GITR Binders by Phage Display

[0939] DNA sequences encoding the ectodomains of human, mouse or cynomolgus GITR (Table 72) were fused in frame with the human IgG1 heavy chain CH2 and CH3 domains on the Fc-knob (Merchant et al., 1998). An IgAse protease cleavage site was introduced between an antigen ectodomain and the Fc of human IgG1. An Avi tag for directed biotinylation was introduced at the C-terminus of the antigen-Fc-knob fusion. Combination of the antigen-Fc knob chain containing the S354C/T366W mutations, with an Fc-hole chain containing the Y349C/T366S/L368A/Y407V mutations allows generation of a heterodimer with one GITR ectodomain chain, thus creating a monomeric form of Fc-linked (FIG. 1A). Table 73 shows the cDNA and amino acid sequences of the antigen Fc-fusion constructs.

TABLE 72
Amino acid numbering of antigen ectodomains (ECD) and their origin

| SEQ ID NO: | Construct | Origin | ECD |
|---|---|---|---|
| 357 | human GITR ECD | synthetized according to | aa 26-162 |
| | | Q9Y5U5 | |
| 358 | cynomolgus GITR | isolated from | aa 20-156 |
| | ECD | cynomolgus blood | |
| 359 | murine GITR ECD | synthetized according | aa 20-153 |
| | | to O35714 | |

TABLE 73
cDNA and amino acid sequences of monomeric antigen Fc(kih)
fusion molecules (produced by combination of one Fc hole
chain with one antigen Fc knob chain)

| SEQ ID NO: | Antigen | Sequence |
|---|---|---|
| 95 | Nucleotide | GACAAAACTCACACATGCCCACCGTGCCCAGCACCTGA |
| | sequence | ACTCCTGGGGGGACCGTCAGTCTTCCTCTTCCCCCCAA |
| | Fc hole chain | AACCCAAGGACACCCTCATGATCTCCCGGACCCCTGAG |
| | | GTCACATGCGTGGTGGTGGACGTGAGCCACGAAGACC |
| | | CTGAGGTCAAGTTCAACTGGTACGTGGACGGCGTGGAG |
| | | GTGCATAATGCCAAGACAAAGCCGCGGGAGGAGCAGT |
| | | ACAACAGCACGTACCGTGTGGTCAGCGTCCTCACCGTC |
| | | CTGCACCAGGACTGGCTGAATGGCAAGGAGTACAAGT |
| | | GCAAGGTCTCCAACAAAGCCCTCCCAGCCCCCATCGAG |
| | | AAAACCATCTCCAAAGCCAAAGGGCAGCCCCGAGAAC |
| | | CACAGGTGTGCACCCTGCCCCCATCCCGGGATGAGCTG |
| | | ACCAAGAACCAGGTCAGCCTCTCGTGCGCAGTCAAAG |
| | | GCTTCTATCCCAGCGACATCGCCGTGGAGTGGGAGAGC |
| | | AATGGGCAGCCGGAGAACAACTACAAGACCACGCCTC |
| | | CCGTGCTGGACTCCGACGGCTCCTTCTTCCTCGTGAGC |
| | | AAGCTCACCGTGGACAAGAGCAGGTGGCAGCAGGGGA |
| | | ACGTCTTCTCATGCTCCGTGATGCATGAGGCTCTGCAC |
| | | AACCACTACACGCAGAAGAGCCTCTCCCTGTCTCCGGG |
| | | TAAA |
| 360 | Nucleotide | CAGAGGCCCACAGGCGGCCCTGGCTGTGGACCTGGCA |
| | sequence | GACTGCTGCTGGGCACCGGCACCGATGCAAGATGCTGT |
| | human GITR | AGAGTGCACACCACCAGATGCTGCCGGGACTACCCTGG |
| | antigen Fc knob | CGAAGAGTGCTGCAGCGAGTGGGACTGTATGTGCGTGC |
| | chain | AGCCCGAGTTCCACTGCGGCGACCCCTGCTGCACCACC |
| | | TGTAGACACCACCCTTGCCCTCCCGGCCAGGGCGTGCA |
| | | GAGCCAGGGCAAGTTCAGCTTCGGCTTCCAGTGCATCG |
| | | ACTGCGCCAGCGGCACCTTCTCTGGCGGCCACGAGGGA |
| | | CACTGCAAGCCCTGGACCGACTGTACCCAGTTCGGCTT |
| | | CCTGACCGTGTTCCCCGGCAACAAGACCCACAACGCCG |
| | | TGTGCGTGCCCGGCAGCCCTCCTGCTGAAGTCGACGGT |
| | | GGTAGTCCGACACCTCCGACACCCGGGGGTGGTTCTGC |
| | | AGACAAAACTCACACATGCCCACCGTGCCCAGCACCTG |
| | | AACTCCTGGGGGGACCGTCAGTCTTCCTCTTCCCCCCA |
| | | AAACCCAAGGACACCCTCATGATCTCCCGGACCCCTGA |
| | | GGTCACATGCGTGGTGGTGGACGTGAGCCACGAAGAC |
| | | CCTGAGGTCAAGTTCAACTGGTACGTGGACGGCGTGGA |
| | | GGTGCATAATGCCAAGACAAAGCCGCGGGAGGAGCAG |
| | | TACAACAGCACGTACCGTGTGGTCAGCGTCCTCACCGT |
| | | CCTGCACCAGGACTGGCTGAATGGCAAGGAGTACAAG |
| | | TGCAAGGTCTCCAACAAAGCCCTCCCAGCCCCCATCGA |
| | | GAAAACCATCTCCAAAGCCAAAGGGCAGCCCCGAGAA |
| | | CCACAGGTGTACACCCTGCCCCCATGCCGGGATGAGCT |
| | | GACCAAGAACCAGGTCAGCCTGTGGTGCCTGGTCAAA |
| | | GGCTTCTATCCCAGCGACATCGCCGTGGAGTGGGAGAG |
| | | CAATGGGCAGCCGGAGAACAACTACAAGACCACGCCT |
| | | CCCGTGCTGGACTCCGACGGCTCCTTCTTCCTCTACAGC |
| | | AAGCTCACCGTGGACAAGAGCAGGTGGCAGCAGGGGA |
| | | ACGTCTTCTCATGCTCCGTGATGCATGAGGCTCTGCAC |
| | | AACCACTACACGCAGAAGAGCCTCTCCCTGTCTCCGGG |
| | | TAAATCCGGAGGCCTGAACGACATCTTCGAGGCCCAGA |
| | | AGATTGAATGGCACGAG |
| 361 | Nucleotide | CAGAGGCCTACAGGCGGCCCTGGATGTGGACCTGGCA |
| | sequence | GACTGCTGCTGGGCACAGGCAAGGATGCCCGGTGCTGT |
| | cynomolgus | AGAGTGCACCCCACCAGATGCTGCCGGGACTACCAGG |
| | GITR antigen | GCGAGGAGTGCTGCAGCGAGTGGGACTGCGTGTGCGT |
| | Fc knob chain | GCAGCCTGAGTTCCACTGCGGCAACCCCTGCTGCACCA |
| | | CCTGTCAGCACCACCCTTGTCCTAGCGGACAGGGCGTG |
| | | CAGCCCCAGGGCAAGTTCAGCTTCGGCTTCAGATGCGT |
| | | GGACTGCGCCCTGGGCACCTTCAGCAGAGGACACGAT |
| | | GGCCACTGCAAGCCCTGGACCGACTGTACCCAGTTCGG |
| | | CTTCCTGACCGTGTTCCCCGGCAACAAGACCCACAACG |
| | | CCGTGTGTGTGCCTGGCAGCCCTCCTGCTGAACCTGTC |
| | | GACGGTGGTAGTCCGACACCTCCGACACCCGGGGGTG |
| | | GTTCTGCAGACAAAACTCACACATGCCCACCGTGCCCA |
| | | GCACCTGAACTCCTGGGGGGACCGTCAGTCTTCCTCTT |
| | | CCCCCCAAAACCCAAGGACACCCTCATGATCTCCCGGA |
| | | CCCCTGAGGTCACATGCGTGGTGGTGGACGTGAGCCAC |
| | | GAAGACCCTGAGGTCAAGTTCAACTGGTACGTGGACG |
| | | GCGTGGAGGTGCATAATGCCAAGACAAAGCCGCGGGA |
| | | GGAGCAGTACAACAGCACGTACCGTGTGGTCAGCGTCC |
| | | TCACCGTCCTGCACCAGGACTGGCTGAATGGCAAGGAG |
| | | TACAAGTGCAAGGTCTCCAACAAAGCCCTCCCAGCCCC |
| | | CATCGAGAAAACCATCTCCAAAGCCAAAGGGCAGCCC |
| | | CGAGAACCACAGGTGTACACCCTGCCCCCATGCCGGGA |
| | | TGAGCTGACCAAGAACCAGGTCAGCCTGTGGTGCCTGG |
| | | TCAAAGGCTTCTATCCCAGCGACATCGCCGTGGAGTGG |
| | | GAGAGCAATGGGCAGCCGGAGAACAACTACAAGACCA |
| | | CGCCTCCCGTGCTGGACTCCGACGGCTCCTTCTTCCTCT |
| | | ACAGCAAGCTCACCGTGGACAAGAGCAGGTGGCAGCA |
| | | GGGGAACGTCTTCTCATGCTCCGTGATGCATGAGGCTC |
| | | TGCACAACCACTACACGCAGAAGAGCCTCTCCCTGTCT |
| | | CCGGGTAAATCCGGAGGCCTGAACGACATCTTCGAGGC |
| | | CCAGAAGATTGAATGGCACGAG |
| 362 | Nucleotide | AGCGTGGTGGAAGAACCCGGCTGCGGCCCTGGCAAGG |
| | sequence | TGCAGAATGGCAGCGGCAACAACACCCGGTGCTGCAG |
| | murine GITR | CCTGTACGCCCCTGGCAAAGAGGACTGCCCCAAAGAA |
| | antigen Fc knob | CGGTGCATCTGCGTGACCCCCGAGTACCACTGCGGCGA |
| | chain | CCCCCAGTGCAAAATCTGCAAGCACTACCCCTGCCAGC |
| | | CCGGCCAGCGGGTCGAAAGCCAGGGCGATATCGTGTTC |
| | | GGCTTCAGATGCGTGGCCTGCGCCATGGGCACCTTCAG |
| | | CGCCGGCAGAGATGGCCACTGCAGACTGTGGACCAAC |
| | | TGCAGCCAGTTCGGCTTCCTGACCATGTTCCCCGGCAA |
| | | CAAGACCCACAACGCCGTGTGCATCCCCGAGCCCCTGC |
| | | CCACAGAGCAGTACGGCCATGTCGACGGTGGTAGTCCG |
| | | ACACCTCCGACACCCGGGGGTGGTTCTGCAGACAAAAC |
| | | TCACACATGCCCACCGTGCCCAGCACCTGAACTCCTGG |
| | | GGGGACCGTCAGTCTTCCTCTTCCCCCCAAAACCCAAG |
| | | GACACCCTCATGATCTCCCGGACCCCTGAGGTCACATG |
| | | CGTGGTGGTGGACGTGAGCCACGAAGACCCTGAGGTC |
| | | AAGTTCAACTGGTACGTGGACGGCGTGGAGGTGCATA |
| | | ATGCCAAGACAAAGCCGCGGGAGGAGCAGTACAACAG |
| | | CACGTACCGTGTGGTCAGCGTCCTCACCGTCCTGCACC |
| | | AGGACTGGCTGAATGGCAAGGAGTACAAGTGCAAGGT |
| | | CTCCAACAAAGCCCTCCCAGCCCCCATCGAGAAAACCA |
| | | TCTCCAAAGCCAAAGGGCAGCCCCGAGAACCACAGGT |
| | | GTACACCCTGCCCCCATGCCGGGATGAGCTGACCAAGA |
| | | ACCAGGTCAGCCTGTGGTGCCTGGTCAAAGGCTTCTAT |
| | | CCCAGCGACATCGCCGTGGAGTGGGAGAGCAATGGGC |
| | | AGCCGGAGAACAACTACAAGACCACGCCTCCCGTGCT |
| | | GGACTCCGACGGCTCCTTCTTCCTCTACAGCAAGCTCA |
| | | CCGTGGACAAGAGCAGGTGGCAGCAGGGGAACGTCTT |
| | | CTCATGCTCCGTGATGCATGAGGCTCTGCACAACCACT |
| | | ACACGCAGAAGAGCCTCTCCCTGTCTCCGGGTAAATCC |
| | | GGAGGCCTGAACGACATCTTCGAGGCCCAGAAGATTG |
| | | AATGGCACGAG |
| 99 | Fc hole chain | DKTHTCPPCPAPELLGGPSVFLFPPKPKDTLMISRTPEVTC |
| | | VVVDVSHEDPEVKFNWYVDGVEVHNAKTKPREEQYNST |
| | | YRVVSVLTVLHQDWLNGKEYKCKVSNKALPAPIEKTISK |
| | | AKGQPREPQVCTLPPSRDELTKNQVSLSCAVKGFYPSDIA |
| | | VEWESNGQPENNYKTTPPVLDSDGSFFLVSKLTVDKSRW |
| | | QQGNVFSCSVMHEALHNHYTQKSLSLSPGK |
| 363 | human GITR | QRPTGGPGCGPGRLLLGTGTDARCCRVHTTRCCRDYPGE |
| | antigen Fc knob | ECCSEWDCMCVQPEFHCGDPCCTTCRHHPCPPGQGVQSQ |
| | chain | GKFSFGFQCIDCASGTFSGGHEGHCKPWTDCTQFGFLTVF |
| | | PGNKTHNAVCVPGSPPAEVDGGSPTPPTPGGGSADKTHT |
| | | CPPCPAPELLGGPSVFLFPPKPKDTLMISRTPEVTCVVVDV |
| | | SHEDPEVKFNWYVDGVEVHNAKTKPREEQYNSTYRVVS |
| | | VLTVLHQDWLNGKEYKCKVSNKALPAPIEKTISKAKGQP |
| | | REPQVYTLPPCRDELTKNQVSLWCLVKGFYPSDIAVEWE |
| | | SNGQPENNYKTTPPVLDSDGSFFLYSKLTVDKSRWQQGN |
| | | VFSCSVMHEALHNHYTQKSLSLSPGKSGGLNDIFEAQKIE |
| | | WHE |
| 364 | cynomolgus | QRPTGGPGCGPGRLLLGTGKDARCCRVHPTRCCRDYQGE |
| | GITR antigen | ECCSEWDCVCVQPEFHCGNPCCTTCQHHPCPSGQGVQPQ |
| | Fc knob chain | GKFSFGFRCVDCALGTFSRGHDGHCKPWTDCTQFGFLTV |
| | | FPGNKTHNAVCVPGSPPAEPVDGGSPTPPTPGGGSADKTH |
| | | TCPPCPAPELLGGPSVFLFPPKPKDTLMISRTPEVTCVVVD |
| | | VSHEDPEVKFNWYVDGVEVHNAKTKPREEQYNSTYRVV |
| | | SVLTVLHQDWLNGKEYKCKVSNKALPAPIEKTISKAKGQ |
| | | PREPQVYTLPPCRDELTKNQVSLWCLVKGFYPSDIAVEW |
| | | ESNGQPENNYKTTPPVLDSDGSFFLYSKLTVDKSRWQQG |
| | | NVFSCSVMHEALHNHYTQKSLSLSPGKSGGLNDIFEAQKI |
| | | EWHE |
| 365 | murine GITR | SVVEEPGCGPGKVQNGSGNNTRCCSLYAPGKEDCPKERC |
| | antigen Fc knob | ICVTPEYHCGDPQCKICKHYPCQPGQRVESQGDIVFGFRC |
| | chain | VACAMGTFSAGRDGHCRLWTNCSQFGFLTMFPGNKTHN |
| | | AVCIPEPLPTEQYGHVDGGSPTPPTPGGGSADKTHTCPPCP |
| | | APELLGGPSVFLFPPKPKDTLMISRTPEVTCVVVDVSHEDP |
| | | EVKFNWYVDGVEVHNAKTKPREEQYNSTYRVVSVLTVL |
| | | HQDWLNGKEYKCKVSNKALPAPIEKTISKAKGQPREPQV |
| | | YTLPPCRDELTKNQVSLWCLVKGFYPSDIAVEWESNGQP |
| | | ENNYKTTPPVLDSDGSFFLYSKLTVDKSRWQQGNVFSCS |
| | | VMHEALHNHYTQKSLSLSPGKSGGLNDIFEAQKIEWHE |

[0940] All GITR-Fc-fusion molecule encoding sequences were cloned into a plasmid vector, which drives expression of the insert from a chimeric MPSV promoter and contains a synthetic polyA sequence located at the 3′ end of the CDS. In addition, the vector contains an EBV oriP sequence for episomal maintenance of the plasmid.

[0941] For preparation of the biotinylated monomeric antigen/Fc fusion molecules, exponentially growing suspension HEK293 EBNA cells were co-transfected with three vectors encoding the two components of fusion protein (knob and hole chains) as well as BirA, an enzyme necessary for the biotinylation reaction. The corresponding vectors were used at a 2:1:0.05 ratio (“antigen ECD-IgAse-Fc knob”:“Fc hole”:“BirA”).

[0942] Antigen production and purification was performed analogously to the procedure described in example 1 (1.1). Yield, concentration and quality of the three different GITR-Fc fusion proteins are summarized in Table 74.

TABLE 74
Characterization of GITR antigens produced as monomeric
Fc fusion molecules

| | | Concentration | Monomer | Biotinylation |
|---|---|---|---|---|
| Antigen | Yield [mg/L] | [mg/L] | content [%] | [%] |
| hu GITR-Fc | 9.07 | 1.94 | 98.3 | 57.6 |
| mu GITR-Fc | 5.72 | 3.09 | 99.6 | 94.5 |
| cy GITR-Fc | 1.13 | 1.78 | 100 | 96.9 |

11.2 Selection of Anti-GITR Antibodies from Generic F(Ab) Libraries

[0943] The anti-GITR antibody 8A06 was selected in Fab-format from the generic phage display library λ-DP88.

[0944] Library Construction

[0945] The λ-DP88 library was constructed on the basis of human germline genes using the V-domain pairing V13_19 (lambda light chain) and VH1_69 (heavy chain) comprising randomized sequence space in CDR3 of the light chain (L3, 3 different lengths) and CDR3 of the heavy chain (H3, 3 different lengths). Library generation was performed by assembly of 3 PCR-amplified fragments applying splicing by overlapping extension (SOE) PCR. Fragment 1 comprises the 5′ end of the antibody gene including randomized L3, fragment 2 is a central constant fragment spanning from L3 to H3 whereas fragment 3 comprises randomized H3 and the 3′ end of the antibody gene. The following primer combinations were used to generate these library fragments for λ-DP88 library: fragment 1 (forward primer LMB3 combined with reverse primers V1_3_19_L3r_V or V1_3_19_L3r_HV or V1_3_19_L3r_HLV), fragment 2 (forward primer RJH80 combined with reverse primer RJH32) and fragment 3 (forward primers DP88-v4-4 or DP88-v4-6 or DP88-v4-8 combined with reverse primer fdseqlong), respectively. PCR parameters for production of library fragments were 5 min initial denaturation at 94° C., 25 cycles of 1 min 94° C., 1 min 58° C., 1 min 72° C. and terminal elongation for 10 min at 72° C. For assembly PCR, using equimolar ratios of the gel-purified single fragments as template, parameters were 3 min initial denaturation at 94° C. and 5 cycles of 30 s 94° C., 1 min 58° C., 2 min 72° C. At this stage, outer primers (LMB3 and fdseqlong) were added and additional 20 cycles were performed prior to a terminal elongation for 10 min at 72° C. After assembly of sufficient amounts of full length randomized Fab constructs, they were digested NcoI/NheI and ligated into similarly treated acceptor phagemid vector. Purified ligations were used for ˜60 transformations into electrocompetent E. coli TG1. Phagemid particles displaying the Fab library were rescued and purified by PEG/NaCl purification to be used for selections. A final library size of 9.0×109 was obtained. Percentages of functional clones, as determined by C-terminal tag detection in dot blot, were 73.7% for the light chain and 80.0% for the heavy chain, respectively.

[0946] Phage Display Selections & ELISA Screening

[0947] Human GITR as antigen for the phage display selections was transiently expressed as N-terminal monomeric Fc-fusion (knob-into-hole heterodimerization of Fc) in HEK EBNA cells and in vivo site-specifically biotinylated via co-expression of BirA biotin ligase at the avi-tag recognition sequence located at the C-terminus of the Fc portion carrying the receptor chain (Fc knob chain).

[0948] Selection rounds (biopanning) were performed in solution according to the following pattern: 1. pre-clearing of ˜1012 phagemid particles with human IgG coated onto NUNC Maxisorp plates at 10 μg/ml to deplete the library of antibodies recognizing the Fc-portion of the antigen, 2. incubation of the pre-cleared phagemid particles in the supernatant with 100 nM biotinylated human GITR for 0.5 h in a total volume of 1 ml, 3. capture of biotinylated human GITR and specifically binding phage by transfer to 4 wells of a neutravidin pre-coated microtiter plate for 10 min (in rounds 1 & 3), 4. washing of respective wells using 5×PBS/Tween20 and 5×PBS, 5. elution of phage particles by addition of 250 ul 100 mM TEA (triethylamine) per well for 10 min and neutralization by addition of 500 ul 1M Tris/HCl pH 7.4 to the pooled eluates from 4 wells, 6. re-infection of log-phase E. coli TG1 cells with the supernatant of eluted phage particles, infection with helperphage VCSM13, incubation on a shaker at 30° C. over night and subsequent PEG/NaCl precipitation of phagemid particles to be used in the next selection round. Selections were carried out over 4 rounds using constant antigen concentrations of 100 nM. In round 2 and 4, in order to avoid enrichment of binders to neutravidin, capture of antigen: phage complexes was performed by addition of 5.4×107 streptavidin-coated magnetic beads. Specific binders were identified by ELISA after round 4 as follows: 100 ul of 100 nM biotinylated human GITR were coated on neutravidin plates. Fab-containing bacterial supernatants were added and binding Fabs were detected via their Flag-tags using an anti-Flag/HRP secondary antibody. Clones exhibiting signals on human GITR and being negative on human Fc, were short-listed for further analyses. They were bacterially expressed in a 0.5 liter culture volume, affinity purified and characterized by SPR-analysis using BioRad's ProteOn XPR36 biosensor to determine binding kinetics and to test cross-reactivity to cynomolgus and murine GITR.

[0949] SPR-Analysis Using BioRad's ProteOn XPR36 Biosensor

[0950] The affinities (K_{D}) of clone 8A06 to human, cynomolgus, and murine GITR were measured by surface plasmon resonance (SPR) using a ProteOn XPR36 instrument (Biorad) at 25° C. with biotinylated human, cynomolgus and murine GITR antigens immobilized on NLC chips by neutravidin capture. Immobilization of antigens (ligand): Recombinant antigens were diluted with PBST (10 mM phosphate, 150 mM sodium chloride pH 7.4, 0.005% Tween 20) to 10 μg/ml, then injected at 30 μl/minute in vertical orientation. Injection of analytes: For ‘one-shot kinetics’ measurements, injection direction was changed to horizontal orientation, two-fold dilution series of purified Fab were injected simultaneously along separate channels 1-5, with association times of 200 s, and dissociation times of 240 s, respectively. Buffer (PBST) was injected along the sixth channel to provide an “in-line” blank for referencing. Association rate constants (kon) and dissociation rate constants (koff) were calculated using a simple one-to-one Langmuir binding model in ProteOn Manager software by simultaneously fitting the association and dissociation sensorgrams. The equilibrium dissociation constant (KD) was calculated as the ratio koff/kon. Clone 8A06 bound to the human and cynomolgus monomeric GITR-Fc fusions with affinities of 4.4 and 67 nM, respectively. No binding could be detected to the murine monomeric GITR-Fc fusion.

[0951] The pRJH52 library template λ-DP88 library is based on the complete Fab coding region comprising PelB leader sequence+V13_19 lambda V-domain+CL constant domain for light chain and pelB+VH1_69 V-domain+CH1 constant domain for heavy chain including tags. Table 75 shows the sequences of generic phage-displayed λ-DP88 library (V13_19/VH1_69) template used for PCRs and Table 76 shows the Primer sequences used for generation of the λ-DP88 library template.

TABLE 75
Sequences of generic phage-displayed
pRJH52 library template λ-DP88 library

| | | |
|---|---|---|
| Molecule | Sequence | Seq ID No |

Amino acid sequence

| | | |
|---|---|---|
| Fab light | SSELTQDPAVSVALGQTVRITCQGDSLRSYYASWYQQK | 366 |
| chain | PGQAPVLVIYGKNNRPSGIPDRFSGSSSGNTASLTITGAQ | |
| V13_19 | AEDEADYYCNSRDSSGNHVVFGGGTKLTVLGQPKAAPS | |
| template | VTLFPPSSEELQANKATLVCLISDFYPGAVTVAWKADSS | |
| | PVKAGVETTTPSKQSNNKYAASSYLSLTPEQWKSHRSY | |
| | SCQVTHEGSTVEKTVAPTECSGAAEQKLISEEDLNGAAD | |
| | YKDDDDKGAA | |
| Fab heavy | QVQLVQSGAEVKKPGSSVKVSCKASGGTFSSYAISWVR | 367 |
| chain | QAPGQGLEWMGGIIPIFGTANYAQKFQGRVTITADKSTS | |
| VH1_69 | TAYMELSSLRSEDTAVYYCARLSPGGYYVMDAWGQGT | |
| template | TVTVSSASTKGPSVFPLAPSSKSTSGGTAALGCLVKDYF | |
| | PEPVTVSWNSGALTSGVHTFPAVLQSSGLYSLSSVVTVP | |
| | SSSLGTQTYICNVNHKPSNTKVDKKVEPKSCDAAASTSA | |
| | HHHHHHAAA | |

Nucleotide sequence

| | | |
|---|---|---|
| Fab light | TCGTCTGAGCTGACTCAGGACCCTGCTGTGTCTGTGG | 368 |
| chain | CCTTGGGACAGACAGTCAGGATCACATGCCAAGGAG | |
| V13_19 | ACAGCCTCAGAAGTTATTATGCAAGCTGGTACCAGCA | |
| template | GAAGCCAGGACAGGCCCCTGTACTTGTCATCTATGGT | |
| | AAAAACAACCGGCCCTCAGGGATCCCAGACCGATTCT | |
| | CTGGCTCCAGCTCAGGAAACACAGCTTCCTTGACCAT | |
| | CACTGGGGCTCAGGCGGAAGATGAGGCTGACTATTAC | |
| | TGTAACTCCCGTGATAGTAGCGGTAATCATGTGGTAT | |
| | TCGGCGGAGGGACCAAGCTGACCGTCCTAGGACAAC | |
| | CCAAGGCTGCCCCCAGCGTGACCCTGTTCCCCCCCAG | |
| | CAGCGAGGAATTGCAGGCCAACAAGGCCACCCTGGT | |
| | CTGCCTGATCAGCGACTTCTACCCAGGCGCCGTGACC | |
| | GTGGCCTGGAAGGCCGACAGCAGCCCCGTGAAGGCC | |
| | GGCGTGGAGACCACCACCCCCAGCAAGCAGAGCAAC | |
| | AACAAGTACGCCGCCAGCAGCTACCTGAGCCTGACCC | |
| | CCGAGCAGTGGAAGAGCCACAGGTCCTACAGCTGCC | |
| | AGGTGACCCACGAGGGCAGCACCGTGGAGAAAACCG | |
| | TGGCCCCCACCGAGTGCAGCGGAGCCGCAGAACAAA | |
| | AACTCATCTCAGAAGAGGATCTGAATGGAGCCGCAG | |
| | ACTACAAGGACGACGACGACAAGGGTGCCGCA | |
| Fab heavy | CAGGTGCAATTGGTGCAGTCTGGGGCTGAGGTGAAGA | 369 |
| chain | AGCCTGGGTCCTCGGTGAAGGTCTCCTGCAAGGCCTC | |
| VH1_69 | CGGAGGCACATTCAGCAGCTACGCTATAAGCTGGGTG | |
| template | CGACAGGCCCCTGGACAAGGGCTCGAGTGGATGGGA | |
| | GGGATCATCCCTATCTTTGGTACAGCAAACTACGCAC | |
| | AGAAGTTCCAGGGCAGGGTCACCATTACTGCAGACAA | |
| | ATCCACGAGCACAGCCTACATGGAGCTGAGCAGCCTG | |
| | AGATCTGAGGACACCGCCGTGTATTACTGTGCGAGAC | |
| | TATCCCCAGGCGGTTACTATGTTATGGATGCCTGGGG | |
| | CCAAGGGACCACCGTGACCGTCTCCTCAGCTAGCACC | |
| | AAAGGCCCATCGGTCTTCCCCCTGGCACCCTCCTCCA | |
| | AGAGCACCTCTGGGGGCACAGCGGCCCTGGGCTGCCT | |
| | GGTCAAGGACTACTTCCCCGAACCGGTGACGGTGTCG | |
| | TGGAACTCAGGCGCCCTGACCAGCGGCGTGCACACCT | |
| | TCCCGGCTGTCCTACAGTCCTCAGGACTCTACTCCCTC | |
| | AGCAGCGTGGTGACCGTGCCCTCCAGCAGCTTGGGCA | |
| | CCCAGACCTACATCTGCAACGTGAATCACAAGCCCAG | |
| | CAACACCAAAGTGGACAAGAAAGTTGAGCCCAAATC | |
| | TTGTGACGCGGCCGCAAGCACTAGTGCCCATCACCAT | |
| | CACCATCACGCCGCGGCA | |
| Complete | ATGAAATACCTATTGCCTACGGCAGCCGCTGGATTGT | 370 |
| pRJH52 Fab | TATTACTCGCGGCCCAGCCGGCCATGGCCTCGTCTGA | |
| sequence | GCTGACTCAGGACCCTGCTGTGTCTGTGGCCTTGGGA | |
| | CAGACAGTCAGGATCACATGCCAAGGAGACAGCCTC | |
| | AGAAGTTATTATGCAAGCTGGTACCAGCAGAAGCCAG | |
| | GACAGGCCCCTGTACTTGTCATCTATGGTAAAAACAA | |
| | CCGGCCCTCAGGGATCCCAGACCGATTCTCTGGCTCC | |
| | AGCTCAGGAAACACAGCTTCCTTGACCATCACTGGGG | |
| | CTCAGGCGGAAGATGAGGCTGACTATTACTGTAACTC | |
| | CCGTGATAGTAGCGGTAATCATGTGGTATTCGGCGGA | |
| | GGGACCAAGCTGACCGTCCTAGGACAACCCAAGGCT | |
| | GCCCCCAGCGTGACCCTGTTCCCCCCCAGCAGCGAGG | |
| | AATTGCAGGCCAACAAGGCCACCCTGGTCTGCCTGAT | |
| | CAGCGACTTCTACCCAGGCGCCGTGACCGTGGCCTGG | |
| | AAGGCCGACAGCAGCCCCGTGAAGGCCGGCGTGGAG | |
| | ACCACCACCCCCAGCAAGCAGAGCAACAACAAGTAC | |
| | GCCGCCAGCAGCTACCTGAGCCTGACCCCCGAGCAGT | |
| | GGAAGAGCCACAGGTCCTACAGCTGCCAGGTGACCC | |
| | ACGAGGGCAGCACCGTGGAGAAAACCGTGGCCCCCA | |
| | CCGAGTGCAGCGGAGCCGCAGAACAAAAACTCATCT | |
| | CAGAAGAGGATCTGAATGGAGCCGCAGACTACAAGG | |
| | ACGACGACGACAAGGGTGCCGCATAATAAGGCGCGC | |
| | CAATTCTATTTCAAGGAGACAGTCATATGAAATACCT | |
| | GCTGCCGACCGCTGCTGCTGGTCTGCTGCTCCTCGCTG | |
| | CCCAGCCGGCGATGGCCCAGGTGCAATTGGTGCAGTC | |
| | TGGGGCTGAGGTGAAGAAGCCTGGGTCCTCGGTGAA | |
| | GGTCTCCTGCAAGGCCTCCGGAGGCACATTCAGCAGC | |
| | TACGCTATAAGCTGGGTGCGACAGGCCCCTGGACAAG | |
| | GGCTCGAGTGGATGGGAGGGATCATCCCTATCTTTGG | |
| | TACAGCAAACTACGCACAGAAGTTCCAGGGCAGGGT | |
| | CACCATTACTGCAGACAAATCCACGAGCACAGCCTAC | |
| | ATGGAGCTGAGCAGCCTGAGATCTGAGGACACCGCC | |
| | GTGTATTACTGTGCGAGACTATCCCCAGGCGGTTACT | |
| | ATGTTATGGATGCCTGGGGCCAAGGGACCACCGTGAC | |
| | CGTCTCCTCAGCTAGCACCAAAGGCCCATCGGTCTTC | |
| | CCCCTGGCACCCTCCTCCAAGAGCACCTCTGGGGGCA | |
| | CAGCGGCCCTGGGCTGCCTGGTCAAGGACTACTTCCC | |
| | CGAACCGGTGACGGTGTCGTGGAACTCAGGCGCCCTG | |
| | ACCAGCGGCGTGCACACCTTCCCGGCTGTCCTACAGT | |
| | CCTCAGGACTCTACTCCCTCAGCAGCGTGGTGACCGT | |
| | GCCCTCCAGCAGCTTGGGCACCCAGACCTACATCTGC | |
| | AACGTGAATCACAAGCCCAGCAACACCAAAGTGGAC | |
| | AAGAAAGTTGAGCCCAAATCTTGTGACGCGGCCGCAA | |
| | GCACTAGTGCCCATCACCATCACCATCACGCCGCGGCA | |

TABLE 76
Primer sequences used for generation of lambda-DP47 library (V13_19/VH3_23)

| SEQ | | |
|---|---|---|
| ID NO: | Primer name | Primer sequence 5′-3′ |
| 132 | LMB3 | CAGGAAACAGCTATGACCATGATTAC |
| 133 | V1_3_19_L3r_V | [chemical structure] |
| | | underlined: 60% original base and 40% randomization as M |
| | | bold and italic: 60% original base and 40% randomization as N |
| 134 | V1_3_19_L3r_HV | [chemical structure] |
| | | underlined: 60% original base and 40% randomization as M |
| | | bolded and italic: 60% original base and 40% randomization as N |
| 135 | V1_3_19_L3r_HLV | [chemical structure] |
| | | underlined: 60% original base and 40% randomization as M |
| | | bolded and italic: 60% original base and 40% randomization as N |
| 136 | RJH80 | TTCGGCGGAGGGACCAAGCTGACCGTCC |
| 113 | RJH32 | TCTCGCACAGTAATACACGGCGGTGTCC |
| 114 | DP88-v4-4 | GGACACCGCCGTGTATTACTGTGCGAGA-1-2-2-3-4-GAC- |
| | | TAC-TGGGGCCAAGGGACCACCGTGACCGTCTCC |
| 115 | DP88-v4-6 | GGACACCGCCGTGTATTACTGTGCGAGA-1-2-2-2-2-3-4 |
| | | GAC-TAC-TGGGGCCAAGGGACCACCGTGACCGTCTCC |
| 116 | DP88-v4-8 | GGACACCGCCGTGTATTACTGTGCGAGA-1-2-2-2-2-2-2-3- |
| | | 4-GAC-TAC-TGGGGCCAAGGGACCACCGTGACCGTCTCC |
| 117 | fdseqlong | GACGTTAGTAAATGAATTTTCTGTATGAGG |

[0952] Clone 8A06 was identified as human GITR-specific binder through the procedure described above. The cDNA sequences of their variable regions are shown in Table 77 below, the corresponding amino acid sequences can be found in Table C. In addition, the cDNA sequences of the variable regions of benchmark antibody 6C8 (prepared according to WO 2006/105021) are shown in Table 77.

TABLE 77
Variable region base pair sequences
for anti-GITR antibodies.

| | SEQ ID | |
|---|---|---|
| Clone | NO: | Sequence |
| 8A06 | 387 (VL) | TCGTCTGAGCTGACTCAGGACCCTGCTGTGTCTGTGGCCTTGGGA |
| | | CAGACAGTCAGGATCACATGCCAAGGAGACAGCCTCAGAAGTT |
| | | ATTATGCAAGCTGGTACCAGCAGAAGCCAGGACAGGCCCCTGTA |
| | | CTTGTCATCTATGGTAAAAACAACCGGCCCTCAGGGATCCCAGA |
| | | CCGATTCTCTGGCTCCAGCTCAGGAAACACAGCTTCCTTGACCAT |
| | | CACTGGGGCTCAGGCGGAAGATGAGGCTGACTATTACTGTAACT |
| | | CCCCTCAGACTAGCGGTAGTGCCGTATTCGGCGGAGGGACCAAG |
| | | CTGACCGTCCTA |
| | 388 (VH) | CAGGTGCAATTGGTGCAGTCTGGGGCTGAGGTGAAGAAGCCTGG |
| | | GTCCTCGGTGAAGGTCTCCTGCAAGGCCTCCGGAGGCACATTCA |
| | | GCAGCTACGCTATAAGCTGGGTGCGACAGGCCCCTGGACAAGGG |
| | | CTCGAGTGGATGGGAGGGATCATCCCTATCTTTGGTACAGCAAA |
| | | CTACGCACAGAAGTTCCAGGGCAGGGTCACCATTACTGCAGACA |
| | | AATCCACGAGCACAGCCTACATGGAGCTGAGCAGCCTGAGATCT |
| | | GAGGACACCGCCGTGTATTACTGTGCGAGAGGTTACTACGCTAT |
| | | CGACTACTGGGGTCAAGGGACCACCGTGACCGTCTCCTCA |
| 6C8 | 389 (VL) | GAGATCGTGATGACCCAGTCCCCCGCCACCCTGTCCGTGTCTCCA |
| | | GGCGAGAGAGCCACCCTGAGCTGCAAGGCCTCCCAGAACGTGG |
| | | GCACCAACGTGGCCTGGTATCAGCAGAAGCCCGGCCAGGCCCCT |
| | | CGGCTGCTGATCTACTCCGCCTCCTACCGGTACTCCGGCATCCCT |
| | | GCCCGGTTCTCCGGCTCTGGCTCTGGCACCGAGTTTACCCTGACC |
| | | ATCTCCAGCCTGCAGTCCGAGGACTTCGCCGTGTACTACTGCCA |
| | | GCAGTACAACACCGACCCCCTGACCTTCGGCGGAGGCACCAAGG |
| | | TGGAAATCAAA |
| | 390 (VH) | CAGGTCACACTGAGAGAGTCCGGCCCTGCCCTGGTCAAGCCCAC |
| | | CCAGACCCTGACCCTGACATGCACCTTCTCCGGCTTCTCCCTGTC |
| | | CACCTCCGGCATGGGCGTGGGCTGGATCAGACAGCCTCCTGGCA |
| | | AGGCCCTGGAATGGCTGGCCCACATTTGGTGGGACGACGACAAG |
| | | TACTACCAGCCCTCCCTGAAGTCCCGGCTGACCATCTCCAAGGA |
| | | CACCTCCAAGAACCAGGTGGTGCTGACCATGACCAACATGGACC |
| | | CCGTGGACACCGCCACCTACTACTGCGCCCGGACCCGGCGGTAC |
| | | TTCCCCTTTGCTTATTGGGGCCAGGGCACCCTGGTCACCGTCTCG |
| | | AGT |

### 11.3 Preparation, Purification and Characterization of Anti-GITR IgG1 P329G LALA Antibodies

[0953] The variable regions of heavy and light chain DNA sequences of selected anti-GITR binders were subcloned in frame with either the constant heavy chain or the constant light chain of human IgG1. The Pro329Gly, Leu234Ala and Leu235Ala mutations have been introduced in the constant region of the knob and hole heavy chains to abrogate binding to Fc gamma receptors according to the method described in International Patent Appl. Publ. No. WO 2012/130831 A1.

[0954] The nucleotide and amino acid sequences of the anti-GITR clones are shown in Table 78. The anti-GITR antibodies were produced by co-transfecting HEK293-EBNA cells with the mammalian expression vectors using polyethylenimine. The cells were transfected with the corresponding expression vectors in a 1:1 ratio (“vector heavy chain”:“vector light chain”). Production and purification of GITR specific antibody 8A06 was performed analogously as described in example 1.3. Table 79 summarizes the results of production and purification of clone 8A06 selected by phage display.

TABLE 78
Sequences of anti-GITR clones in P329GLALA human IgG1 format

| Clone | SEQ ID No. | Sequence |
|---|---|---|
| 8A06 | 391 | TCGTCTGAGCTGACTCAGGACCCTGCTGTGTCTGTGGCCTTG |
| | (nucleotide | GGACAGACAGTCAGGATCACATGCCAAGGAGACAGCCTCA |
| | sequence light | GAAGTTATTATGCAAGCTGGTACCAGCAGAAGCCAGGACAG |
| | chain) | GCCCCTGTACTTGTCATCTATGGTAAAAACAACCGGCCCTC |
| | | AGGGATCCCAGACCGATTCTCTGGCTCCAGCTCAGGAAACA |
| | | CAGCTTCCTTGACCATCACTGGGGCTCAGGCGGAAGATGAG |
| | | GCTGACTATTACTGTAACTCCCCTCAGACTAGCGGTAGTGCC |
| | | GTATTCGGCGGAGGGACCAAGCTGACCGTCCTAGGTCAACC |
| | | CAAGGCTGCCCCCAGCGTGACCCTGTTCCCCCCCAGCAGCG |
| | | AGGAACTGCAGGCCAACAAGGCCACCCTGGTCTGCCTGATC |
| | | AGCGACTTCTACCCAGGCGCCGTGACCGTGGCCTGGAAGGC |
| | | CGACAGCAGCCCCGTGAAGGCCGGCGTGGAGACCACCACC |
| | | CCCAGCAAGCAGAGCAACAACAAGTACGCCGCCAGCAGCT |
| | | ACCTGAGCCTGACCCCCGAGCAGTGGAAGAGCCACAGGTCC |
| | | TACAGCTGCCAGGTGACCCACGAGGGCAGCACCGTGGAGA |
| | | AAACCGTGGCCCCCACCGAGTGCAGC |
| | 392 | CAGGTGCAATTGGTGCAGTCTGGGGCTGAGGTGAAGAAGCC |
| | (nucleotide | TGGGTCCTCGGTGAAGGTCTCCTGCAAGGCCTCCGGAGGCA |
| | sequence heavy | CATTCAGCAGCTACGCTATAAGCTGGGTGCGACAGGCCCCT |
| | chain) | GGACAAGGGCTCGAGTGGATGGGAGGGATCATCCCTATCTT |
| | | TGGTACAGCAAACTACGCACAGAAGTTCCAGGGCAGGGTCA |
| | | CCATTACTGCAGACAAATCCACGAGCACAGCCTACATGGAG |
| | | CTGAGCAGCCTGAGATCTGAGGACACCGCCGTGTATTACTG |
| | | TGCGAGAGGTTACTACGCTATCGACTACTGGGGTCAAGGGA |
| | | CCACCGTGACCGTCTCCTCAGCTAGCACCAAGGGCCCATCG |
| | | GTCTTCCCCCTGGCACCCTCCTCCAAGAGCACCTCTGGGGGC |
| | | ACAGCGGCCCTGGGCTGCCTGGTCAAGGACTACTTCCCCGA |
| | | ACCGGTGACGGTGTCGTGGAACTCAGGCGCCCTGACCAGCG |
| | | GCGTGCACACCTTCCCGGCTGTCCTACAGTCCTCAGGACTCT |
| | | ACTCCCTCAGCAGCGTGGTGACCGTGCCCTCCAGCAGCTTG |
| | | GGCACCCAGACCTACATCTGCAACGTGAATCACAAGCCCAG |
| | | CAACACCAAGGTGGACAAGAAAGTTGAGCCCAAATCTTGTG |
| | | ACAAAACTCACACATGCCCACCGTGCCCAGCACCTGAAGCT |
| | | GCAGGGGGACCGTCAGTCTTCCTCTTCCCCCCAAAACCCAA |
| | | GGACACCCTCATGATCTCCCGGACCCCTGAGGTCACATGCG |
| | | TGGTGGTGGACGTGAGCCACGAAGACCCTGAGGTCAAGTTC |
| | | AACTGGTACGTGGACGGCGTGGAGGTGCATAATGCCAAGAC |
| | | AAAGCCGCGGGAGGAGCAGTACAACAGCACGTACCGTGTG |
| | | GTCAGCGTCCTCACCGTCCTGCACCAGGACTGGCTGAATGG |
| | | CAAGGAGTACAAGTGCAAGGTCTCCAACAAAGCCCTCGGCG |
| | | CCCCCATCGAGAAAACCATCTCCAAAGCCAAAGGGCAGCCC |
| | | CGAGAACCACAGGTGTACACCCTGCCCCCATCCCGGGATGA |
| | | GCTGACCAAGAACCAGGTCAGCCTGACCTGCCTGGTCAAAG |
| | | GCTTCTATCCCAGCGACATCGCCGTGGAGTGGGAGAGCAAT |
| | | GGGCAGCCGGAGAACAACTACAAGACCACGCCTCCCGTGCT |
| | | GGACTCCGACGGCTCCTTCTTCCTCTACAGCAAGCTCACCGT |
| | | GGACAAGAGCAGGTGGCAGCAGGGGAACGTCTTCTCATGCT |
| | | CCGTGATGCATGAGGCTCTGCACAACCACTACACGCAGAAG |
| | | AGCCTCTCCCTGTCTCCGGGTAAA |
| | 393 | SSELTQDPAVSVALGQTVRITCQGDSLRSYYASWYQQKPGQA |
| | (Light chain) | PVLVIYGKNNRPSGIPDRFSGSSSGNTASLTITGAQAEDEADYY |
| | | CNSPQTSGSAVFGGGTKLTVLGQPKAAPSVTLFPPSSEELQAN |
| | | KATLVCLISDFYPGAVTVAWKADSSPVKAGVETTTPSKQSNN |
| | | KYAASSYLSLTPEQWKSHRSYSCQVTHEGSTVEKTVAPTECS |
| | 394 | QVQLVQSGAEVKKPGSSVKVSCKASGGTFSSYAISWVRQAPG |
| | (Heavy chain) | QGLEWMGGIIPIFGTANYAQKFQGRVTITADKSTSTAYMELSS |
| | | LRSEDTAVYYCARGYYAIDYWGQGTTVTVSSASTKGPSVFPL |
| | | APSSKSTSGGTAALGCLVKDYFPEPVTVSWNSGALTSGVHTFP |
| | | AVLQSSGLYSLSSVVTVPSSSLGTQTYICNVNHKPSNTKVDKK |
| | | VEPKSCDKTHTCPPCPAPEAAGGPSVFLFPPKPKDTLMISRTPE |
| | | VTCVVVDVSHEDPEVKFNWYVDGVEVHNAKTKPREEQYNST |
| | | YRVVSVLTVLHQDWLNGKEYKCKVSNKALGAPIEKTISKAKG |
| | | QPREPQVYTLPPSRDELTKNQVSLTCLVKGFYPSDIAVEWESN |
| | | GQPENNYKTTPPVLDSDGSFFLYSKLTVDKSRWQQGNVFSCSV |
| | | MHEALHNHYTQKSLSLSPGK |
| 6C8 | 395 | GAGATCGTGATGACCCAGTCCCCCGCCACCCTGTCCGTGTCT |
| | (nucleotide | CCAGGCGAGAGAGCCACCCTGAGCTGCAAGGCCTCCCAGA |
| | sequence light | ACGTGGGCACCAACGTGGCCTGGTATCAGCAGAAGCCCGGC |
| | chain) | CAGGCCCCTCGGCTGCTGATCTACTCCGCCTCCTACCGGTAC |
| | | TCCGGCATCCCTGCCCGGTTCTCCGGCTCTGGCTCTGGCACC |
| | | GAGTTTACCCTGACCATCTCCAGCCTGCAGTCCGAGGACTTC |
| | | GCCGTGTACTACTGCCAGCAGTACAACACCGACCCCCTGAC |
| | | CTTCGGCGGAGGCACCAAGGTGGAAATCAAACGTACGGTG |
| | | GCTGCACCATCTGTCTTCATCTTCCCGCCATCTGATGAGCAG |
| | | TTGAAATCTGGAACTGCCTCTGTTGTGTGCCTGCTGAATAAC |
| | | TTCTATCCCAGAGAGGCCAAAGTACAGTGGAAGGTGGATAA |
| | | CGCCCTCCAATCGGGTAACTCCCAGGAGAGTGTCACAGAGC |
| | | AGGACAGCAAGGACAGCACCTACAGCCTCAGCAGCACCCT |
| | | GACGCTGAGCAAAGCAGACTACGAGAAACACAAAGTCTAC |
| | | GCCTGCGAAGTCACCCATCAGGGCCTGAGCTCGCCCGTCAC |
| | | AAAGAGCTTCAACAGGGGAGAGTGT |
| | 396 | CAGGTCACACTGAGAGAGTCCGGCCCTGCCCTGGTCAAGCC |
| | (nucleotide | CACCCAGACCCTGACCCTGACATGCACCTTCTCCGGCTTCTC |
| | sequence heavy | CCTGTCCACCTCCGGCATGGGCGTGGGCTGGATCAGACAGC |
| | chain) | CTCCTGGCAAGGCCCTGGAATGGCTGGCCCACATTTGGTGG |
| | | GACGACGACAAGTACTACCAGCCCTCCCTGAAGTCCCGGCT |
| | | GACCATCTCCAAGGACACCTCCAAGAACCAGGTGGTGCTGA |
| | | CCATGACCAACATGGACCCCGTGGACACCGCCACCTACTAC |
| | | TGCGCCCGGACCCGGCGGTACTTCCCCTTTGCTTATTGGGGC |
| | | CAGGGCACCCTGGTCACCGTCTCGAGTGCTAGCACCAAGGG |
| | | CCCATCGGTCTTCCCCCTGGCACCCTCCTCCAAGAGCACCTC |
| | | TGGGGGCACAGCGGCCCTGGGCTGCCTGGTCAAGGACTACT |
| | | TCCCCGAACCGGTGACGGTGTCGTGGAACTCAGGCGCCCTG |
| | | ACCAGCGGCGTGCACACCTTCCCGGCTGTCCTACAGTCCTC |
| | | AGGACTCTACTCCCTCAGCAGCGTGGTGACCGTGCCCTCCA |
| | | GCAGCTTGGGCACCCAGACCTACATCTGCAACGTGAATCAC |
| | | AAGCCCAGCAACACCAAGGTGGACAAGAAAGTTGAGCCCA |
| | | AATCTTGTGACAAAACTCACACATGCCCACCGTGCCCAGCA |
| | | CCTGAAGCTGCAGGGGGACCGTCAGTCTTCCTCTTCCCCCCA |
| | | AAACCCAAGGACACCCTCATGATCTCCCGGACCCCTGAGGT |
| | | CACATGCGTGGTGGTGGACGTGAGCCACGAAGACCCTGAGG |
| | | TCAAGTTCAACTGGTACGTGGACGGCGTGGAGGTGCATAAT |
| | | GCCAAGACAAAGCCGCGGGAGGAGCAGTACAACAGCACGT |
| | | ACCGTGTGGTCAGCGTCCTCACCGTCCTGCACCAGGACTGG |
| | | CTGAATGGCAAGGAGTACAAGTGCAAGGTCTCCAACAAAG |
| | | CCCTCGGCGCCCCCATCGAGAAAACCATCTCCAAAGCCAAA |
| | | GGGCAGCCCCGAGAACCACAGGTGTACACCCTGCCCCCATC |
| | | CCGGGATGAGCTGACCAAGAACCAGGTCAGCCTGACCTGCC |
| | | TGGTCAAAGGCTTCTATCCCAGCGACATCGCCGTGGAGTGG |
| | | GAGAGCAATGGGCAGCCGGAGAACAACTACAAGACCACGC |
| | | CTCCCGTGCTGGACTCCGACGGCTCCTTCTTCCTCTACAGCA |
| | | AGCTCACCGTGGACAAGAGCAGGTGGCAGCAGGGGAACGT |
| | | CTTCTCATGCTCCGTGATGCATGAGGCTCTGCACAACCACTA |
| | | CACGCAGAAGAGCCTCTCCCTGTCTCCGGGTAAA |
| | 397 | EIVMTQSPATLSVSPGERATLSCKASQNVGTNVAWYQQKPGQ |
| | (Light chain) | APRLLIYSASYRYSGIPARFSGSGSGTEFTLTISSLQSEDFAVYY |
| | | CQQYNTDPLTFGGGTKVEIKRTVAAPSVFIFPPSDEQLKSGTAS |
| | | VVCLLNNFYPREAKVQWKVDNALQSGNSQESVTEQDSKDSTY |
| | | SLSSTLTLSKADYEKHKVYACEVTHQGLSSPVTKSFNRGEC |
| | 398 | QVTLRESGPALVKPTQTLTLTCTFSGFSLSTSGMGVGWIRQPPG |
| | (Heavy chain) | KALEWLAHIWWDDDKYYQPSLKSRLTISKDTSKNQVVLTMTN |
| | | MDPVDTATYYCARTRRYFPFAYWGQGTLVTVSSASTKGPSVF |
| | | PLAPSSKSTSGGTAALGCLVKDYFPEPVTVSWNSGALTSGVHT |
| | | FPAVLQSSGLYSLSSWTVPSSSLGTQTYICNVNHKPSNTKVDK |
| | | KVEPKSCDKTHTCPPCPAPEAAGGPSVFLFPPKPKDTLMISRTP |
| | | EVTCVVVDVSHEDPEVKFNWYVDGVEVHNAKTKPREEQYNS |
| | | TYRVVSVLTVLHQDWLNGKEYKCKVSNKALGAPIEKTISKAK |
| | | GQPREPQVYTLPPSRDELTKNQVSLTCLVKGFYPSDIAVEWES |
| | | NGQPENNYKTTPPVLDSDGSFFLYSKLTVDKSRWQQGNVFSCS |
| | | VMHEALHNHYTQKSLSLSPGK |

TABLE 79
Biochemical analysis of anti-GITR P329G LALA IgG1 antibodies

| | | | Purity | |
|---|---|---|---|---|
| | Yield | Monomer | (non-red) | CE-SDS |
| Clone | [mg/L] | [%] | [%] | (red) |
| 8A06 P329GLALA IgG | 6.74 | 100 | 98.13 | 98.66 |
| 6C8 P329GLALA IgG | 14.71 | 100 | 97.62 | 98.95 |

### 11.4 Characterization of GITR Clone 8A06

### 11.4.1 Surface Plasmon Resonance (Avidity+Affinity)

### 11.4.1.1 Species Cross-Reactivity and Affinity of Clones 8A06 and 6C8

[0955] Binding of GITR-specific antibodies (clone 8A06 and 6C8) to the recombinant GITR Fc (kih) was assessed by surface plasmon resonance (SPR). All SPR experiments were performed on a Biacore T200 at 25° C. with HBS-EP as running buffer (0.01 M HEPES pH 7.4, 0.15 M NaCl, 3 mM EDTA, 0.005% Surfactant P20, Biacore, Freiburg/Germany). In the same experiment, the species selectivity and the avidity of the interaction between the GITR binder (human IgG1 P329GLALA), and recombinant GITR (human, cyno and murine) was determined. Biotinylated human, cynomolgus and murine GITR Fc (kih) were directly coupled to different flow cells of a streptavidin (SA) sensor chip. Immobilization levels up to 100 resonance units (RU) were used.

[0956] Anti-GITR human IgG1 P329GLALA antibody was passed at a concentration range from 0.2 to 200 nM (4-fold dilution) with a flow of 30 μL/minute through the flow cells over 120 seconds. Complex dissociation was monitored for 180 seconds. Bulk refractive index differences were corrected for by subtracting the response obtained in a reference flow cell, where no protein was immobilized. Kinetic constants were derived using the Biacore T200 Evaluation Software (vAA, Biacore AB, Uppsala/Sweden), to fit rate equations for 1:1 Langmuir binding by numerical integration and used to estimate qualitatively the avidity (FIGS. 49A, 49B, 49C, and 49D).

[0957] In the same experiment, the affinities of the interaction between the GITR antibody (human IgG1 P329GLALA) to recombinant GITR (human and cyno) were determined. Anti-human Fab antibody (Biacore, Freiburg/Germany) was directly coupled on a CMS chip at pH 5.0 using the standard amine coupling kit (Biacore, Freiburg/Germany). The immobilization level was approximately 7000 RU. The GITR antibody was captured for 90 seconds at 5 nM. Recombinant human and cynomolgus GITR Fc(kih) was passed at a concentration range from 2.7 to 2000 nM with a flow of 30 μL/minutes through the flow cells over 180 seconds. The dissociation was monitored for 180 seconds. Bulk refractive index differences were corrected for by subtracting the response obtained on reference flow cell. Here, the antigens were flown over a surface with immobilized anti-human Fab antibody but on which HBS-EP has been injected rather than the antibodies (FIG. 50A). Kinetic constants were derived using the Biacore T200 Evaluation Software (vAA, Biacore AB, Uppsala/Sweden), to fit rate equations for 1:1 Langmuir binding by numerical integration. Affinity constants for the interaction between anti-GITR P329GLALA IgG1 (clone 8A06) and GITR Fc(kih) were determined by fitting to a 1:1 Langmuir binding (Table 80).

[0958] Clones 8A06 and 6C8 bind to human and cynomolgus GITR Fc (kih), but are not cross reactive for murine GITR.

TABLE 80
Binding of anti-GITR antibodies to recombinant GITR

| | | Recombinant human GITR | | |
|---|---|---|---|---|
| | | (affinity format) | | |
| | | ka | | KD |
| | | (1/Ms) | kd (1/s) | (M) |
| | Clone 8A06 | | | |
| Human | +++ | 1.2E+04 | 3.6E−04 | 2.9E−08 |
| GITR | | | | |
| Cyno | ++ | 2.7E+04 | 3.3E−02 | 1.2E−06 |
| GITR | | | | |
| Murine | Not binding | Not binding | | |
| GITR | | | | |
| | Clone 6C8 | | | |
| Human | +++ | 3.8E+04 | 1.1E−03 | 3.0E−08 |
| GITR | | | | |
| Cyno | ++ | 7.3E+04 | 1.4E−02 | 1.9E−07 |
| GITR | | | | |

| | | |
|---|---|---|
| Murine | Not binding | Not binding |
| GITR | | |

### 11.4.1.2 Ligand Blocking Property

[0959] To determine the capacity of the GITR-specific human IgG1 P329GLALA antibody 8A06 to interfere with GITR/GITR-ligand interaction we used human GITR ligand (R&D systems).

[0960] Human GITR ligand was directly coupled to two flow cells of a CM5 chip at approximately 2000 RU by pH 5.0 using the standard amine coupling kit (Biacore, Freiburg/Germany). Recombinant human GITR Fc (kih) was passed on the second flow cell at a concentration of 100 nM with a flow of 30 μL/minute over 90 seconds. The dissociation was omitted and anti-GITR human IgG1P329LALA was passed on both flow cells at a concentration of 500 nM with a flow of 30 uL/minute over 90 seconds. The dissociation was monitored for 60 seconds. Bulk refractive index differences were corrected for by subtracting the response obtained on reference flow cell. Here, the antibodies were flown over a surface with immobilized human GITR ligand but on which HBS-EP has been injected instead of recombinant human GITR Fc (kih).

[0961] The GITR clone 8A06 bound to the complex of human GITR with its GITR ligand (FIGS. 51A, 51B, and 51C). Thus, this antibody does not compete with the ligand for binding to human GITR and is therefore termed “non-ligand blocking”.

TABLE 81
Ligand binding property of the anti-GITR clones 8A06 and 6C8
determined by surface plasmon resonance

| | | | | Ligand |
|---|---|---|---|---|
| Clone | Ligand | First injection | Second injection | blocking |
| 8A06 | Hu GITR | human GITR | anti-GITR 8A06 | NO |
| | Ligand | Fc(kih) | IgG | |
| | | (binding observed) | (binding | |
| | | | observed) | |
| 6C8 | Hu GITR | human GITR | anti-GITR 6C8 | yes |
| | Ligand | Fc(kih) | IgG | |
| | | (binding observed) | (binding | |
| | | | observed) | |

### 11.4.1.3 Epitope Binning

[0962] The epitope recognized by the anti-GITR antibodies was characterized by surface plasmon resonance. First, the ability of the antibodies to compete for binding to human GITR was assessed by surface plasmon resonance. The aim of these experiments was to define an “epitope bin”. Antibodies that compete for a similar or an overlapping epitope are not able to bind simultaneously to GITR and belong to an “epitope bin”. Anti-GITR antibodies that can bind simultaneously to GITR do not share an epitope, or part of it, and are therefore grouped into a different epitope bin.

[0963] To analyze competitive binding for human or murine receptor of the anti-GITR human IgG1 P329GLALA, the phage derived anti-GITR clone 8A06 and benchmark antibody 6C8 were directly coupled to CM5 chip at approx. 1000 RU by pH 5.5 using the standard amine coupling kit (Biacore, Freiburg/Germany). Recombinant human GITR Fc (kih) was injected at a concentration of 200 nM with a flow of 30 μL/min over 180 seconds. The dissociation was omitted and a second anti-GITR human IgG1 P329GLALA antibody was passed at a concentration of 200 nM with a flow of 30 μL/min over 90 seconds. The dissociation was monitored for 90 sec. Bulk refractive index differences were corrected for by subtracting the response obtained on reference flow cell.

[0964] The SPR experiments were performed on a Biacore T200 at 25° C. with HBS-EP as running buffer (0.01 M HEPES pH 7.4, 0.15 M NaCl, 3 mM EDTA, 0.005% Surfactant P20, Biacore, Freiburg/Germany).

[0965] The competition binding experiment shows that the anti-GITR clone 8A06 and 6C8 bind to a different spatial epitope, since the two antibodies can bind simultaneously to human GITR Fc(kih) (Table 82, FIGS. 52B and 52C).

TABLE 82
Summary of competition binding experiments

Second injection

| Immobilized on chip | First injection | 8A06 | 6C8 |
|---|---|---|---|
| 8A06 | Human GITR | 0 | 1 |
| | Fc(kih) | | |
| 6C8 | Human GITR | 1 | 0 |
| | Fc(kih) | | |

0 = no binding;
1, binding

### Example 12

### Preparation, Purification and Characterization of Bispecific Bivalent Antibodies Targeting GITR and a Tumor Associated Antigen (TAA)

### 12.1 Generation of Bispecific Tetravalent Constructs Targeting GITR and Fibroblast Activation Protein (FAP) (4+1 and 4+2 Formats)

[0966] Bispecific agonistic GITR antibodies with tetravalent binding for GITR and monovalent binding for FAP, also termed 4+1 bispecific antigen binding molecules, were prepared as depicted in FIG. 53A.

[0967] One heavy chain HCl of the construct was comprised of the following components: VHCH1_VHCH1 of an anti-GITR followed by Fc hole, at which C-terminus a VL or VH, respectively, of an anti-FAP binder (clone 28H1) was fused. Heavy chain HC2 was comprised of VHCH1_VHCH1 of anti-GITR followed by Fc knob, at which C-terminus a VH or VL, of the anti-FAP binder was fused.

[0968] Binders against GITR were generated as described in Example 11. The generation and preparation of the FAP binders is described in WO 2012/020006 A2, which is incorporated herein by reference.

[0969] Combination of both heavy chains allows generation of a heterodimer, which includes a FAP binding moiety and four GITR binding Fabs. The Pro329Gly, Leu234Ala and Leu235Ala mutations were introduced in the constant region of the heavy chains to abrogate binding to Fc gamma receptors according to the method described in International Patent Appl. Publ. No. WO 2012/130831 A1. The heavy chain fusion proteins were co-expressed with the light chain of the anti-GITR binder (CLVL). The nucleotide and amino acid sequences of the resulting bispecific, tetravalent construct can be found in Table 83.

TABLE 83
cDNA and amino acid sequences of mature bispecific 4 + 1
anti-GITR, anti-FAP human IgG1 P329GLALA kih antibodies
(constructs with a-FAP VH fused to knob and VL fused to hole chain)

| SEQ ID | | |
|---|---|---|
| NO: | Description | Sequence |
| 391 | (8A06) VLCL-light | TCGTCTGAGCTGACTCAGGACCCTGCTGTGTCTGTG |
| | chain | GCCTTGGGACAGACAGTCAGGATCACATGCCAAGG |
| | (nucleotide sequence) | AGACAGCCTCAGAAGTTATTATGCAAGCTGGTACCA |
| | | GCAGAAGCCAGGACAGGCCCCTGTACTTGTCATCTA |
| | | TGGTAAAAACAACCGGCCCTCAGGGATCCCAGACCG |
| | | ATTCTCTGGCTCCAGCTCAGGAAACACAGCTTCCTT |
| | | GACCATCACTGGGGCTCAGGCGGAAGATGAGGCTG |
| | | ACTATTACTGTAACTCCCCTCAGACTAGCGGTAGTG |
| | | CCGTATTCGGCGGAGGGACCAAGCTGACCGTCCTAG |
| | | GTCAACCCAAGGCTGCCCCCAGCGTGACCCTGTTCC |
| | | CCCCCAGCAGCGAGGAACTGCAGGCCAACAAGGCC |
| | | ACCCTGGTCTGCCTGATCAGCGACTTCTACCCAGGC |
| | | GCCGTGACCGTGGCCTGGAAGGCCGACAGCAGCCCC |
| | | GTGAAGGCCGGCGTGGAGACCACCACCCCCAGCAA |
| | | GCAGAGCAACAACAAGTACGCCGCCAGCAGCTACC |
| | | TGAGCCTGACCCCCGAGCAGTGGAAGAGCCACAGG |
| | | TCCTACAGCTGCCAGGTGACCCACGAGGGCAGCACC |
| | | GTGGAGAAAACCGTGGCCCCCACCGAGTGCAGC |
| 399 | HC 1 | CAGGTGCAGCTGGTGCAGTCTGGCGCCGAAGTGAAG |
| | (8A06) | AAACCCGGCAGCAGCGTGAAGGTGTCCTGCAAGGCT |
| | VHCH1_VHCH1 Fc | TCCGGCGGCACCTTCAGCAGCTACGCCATTTCTTGG |
| | knob VH (28H1) | GTGCGCCAGGCCCCTGGACAGGGCCTGGAATGGATG |
| | (nucleotide sequence) | GGCGGCATCATCCCCATCTTCGGCACCGCCAACTAC |
| | | GCCCAGAAATTCCAGGGCAGAGTGACCATCACCGCC |
| | | GACAAGAGCACCAGCACCGCCTACATGGAACTGAG |
| | | CAGCCTGCGGAGCGAGGACACCGCCGTGTACTATTG |
| | | CGCCAGAGGCTACTACGCCATCGACTACTGGGGCCA |
| | | GGGCACCACCGTGACCGTGTCTAGCGCTTCTACCAA |
| | | GGGCCCCAGCGTGTTCCCTCTGGCCCCTAGCAGCAA |
| | | GAGCACATCTGGCGGAACAGCCGCCCTGGGCTGCCT |
| | | CGTGAAGGACTACTTTCCCGAGCCCGTGACAGTGTC |
| | | CTGGAACTCTGGCGCCCTGACAAGCGGCGTGCACAC |
| | | CTTTCCAGCCGTGCTCCAGAGCAGCGGCCTGTACTC |
| | | TCTGAGCAGCGTCGTGACTGTGCCCAGCAGCAGCCT |
| | | GGGAACCCAGACCTACATCTGCAACGTGAACCACAA |
| | | GCCCAGCAACACCAAGGTGGACAAGAAGGTGGAAC |
| | | CCAAGAGCTGCGACGGCGGAGGCGGATCTGGCGGC |
| | | GGAGGATCCCAGGTGCAGCTGGTGCAGAGCGGAGC |
| | | TGAAGTGAAAAAGCCTGGCTCCTCCGTGAAAGTGTC |
| | | TTGTAAAGCCAGCGGCGGCACATTCTCTAGCTATGC |
| | | CATCAGCTGGGTGCGGCAGGCTCCAGGCCAGGGACT |
| | | GGAATGGATGGGAGGAATTATCCCTATTTTTGGGAC |
| | | AGCCAATTATGCTCAGAAATTTCAGGGGCGCGTGAC |
| | | AATTACAGCCGACAAGTCCACCTCTACAGCTTATAT |
| | | GGAACTGTCCTCCCTGCGCTCCGAGGATACAGCTGT |
| | | GTATTACTGCGCTCGGGGCTATTATGCCATTGATTAT |
| | | TGGGGACAGGGAACAACAGTGACTGTGTCCTCCGCT |
| | | AGCACCAAGGGCCCATCGGTCTTCCCCCTGGCACCC |
| | | TCCTCCAAGAGCACCTCTGGGGGCACAGCGGCCCTG |
| | | GGCTGCCTGGTCAAGGACTACTTCCCCGAACCGGTG |
| | | ACGGTGTCGTGGAACTCAGGCGCCCTGACCAGCGGC |
| | | GTGCACACCTTCCCGGCTGTCCTACAGTCCTCAGGA |
| | | CTCTACTCCCTCAGCAGCGTGGTGACCGTGCCCTCC |
| | | AGCAGCTTGGGCACCCAGACCTACATCTGCAACGTG |
| | | AATCACAAGCCCAGCAACACCAAGGTGGACAAGAA |
| | | AGTTGAGCCCAAATCTTGTGACAAAACTCACACATG |
| | | CCCACCGTGCCCAGCACCTGAAGCTGCAGGGGGACC |
| | | GTCAGTCTTCCTCTTCCCCCCAAAACCCAAGGACAC |
| | | CCTCATGATCTCCCGGACCCCTGAGGTCACATGCGT |
| | | GGTGGTGGACGTGAGCCACGAAGACCCTGAGGTCA |
| | | AGTTCAACTGGTACGTGGACGGCGTGGAGGTGCATA |
| | | ATGCCAAGACAAAGCCGCGGGAGGAGCAGTACAAC |
| | | AGCACGTACCGTGTGGTCAGCGTCCTCACCGTCCTG |
| | | CACCAGGACTGGCTGAATGGCAAGGAGTACAAGTG |
| | | CAAGGTCTCCAACAAAGCCCTCGGCGCCCCCATCGA |
| | | GAAAACCATCTCCAAAGCCAAAGGGCAGCCCCGAG |
| | | AACCACAGGTGTACACCCTGCCCCCCTGCAGAGATG |
| | | AGCTGACCAAGAACCAGGTGTCCCTGTGGTGTCTGG |
| | | TCAAGGGCTTCTACCCCAGCGATATCGCCGTGGAGT |
| | | GGGAGAGCAACGGCCAGCCTGAGAACAACTACAAG |
| | | ACCACCCCCCCTGTGCTGGACAGCGACGGCAGCTTC |
| | | TTCCTGTACTCCAAACTGACCGTGGACAAGAGCCGG |
| | | TGGCAGCAGGGCAACGTGTTCAGCTGCAGCGTGATG |
| | | CACGAGGCCCTGCACAACCACTACACCCAGAAGTCC |
| | | CTGAGCCTGAGCCCCGGCGGAGGCGGCGGAAGCGG |
| | | AGGAGGAGGATCCGGAGGAGGGGGAAGTGGCGGCG |
| | | GAGGATCTGAGGTGCAGCTGCTGGAATCCGGCGGA |
| | | GGCCTGGTGCAGCCTGGCGGATCTCTGAGACTGTCC |
| | | TGCGCCGCCTCCGGCTTCACCTTCTCCTCCCACGCCA |
| | | TGTCCTGGGTCCGACAGGCTCCTGGCAAAGGCCTGG |
| | | AATGGGTGTCCGCCATCTGGGCCTCCGGCGAGCAGT |
| | | ACTACGCCGACTCTGTGAAGGGCCGGTTCACCATCT |
| | | CCCGGGACAACTCCAAGAACACCCTGTACCTGCAGA |
| | | TGAACTCCCTGCGGGCCGAGGACACCGCCGTGTACT |
| | | ACTGTGCCAAGGGCTGGCTGGGCAACTTCGACTACT |
| | | GGGGCCAGGGCACCCTGGTCACCGTGTCCAGC |
| 400 | HC 2 | CAGGTGCAGCTGGTGCAGTCTGGCGCCGAAGTGAAG |
| | (8A06) | AAACCCGGCAGCAGCGTGAAGGTGTCCTGCAAGGCT |
| | VHCH1_VHCH1 Fc | TCCGGCGGCACCTTCAGCAGCTACGCCATTTCTTGG |
| | hole VL (28H1) | GTGCGCCAGGCCCCTGGACAGGGCCTGGAATGGATG |
| | (nucleotide sequence) | GGCGGCATCATCCCCATCTTCGGCACCGCCAACTAC |
| | | GCCCAGAAATTCCAGGGCAGAGTGACCATCACCGCC |
| | | GACAAGAGCACCAGCACCGCCTACATGGAACTGAG |
| | | CAGCCTGCGGAGCGAGGACACCGCCGTGTACTATTG |
| | | CGCCAGAGGCTACTACGCCATCGACTACTGGGGCCA |
| | | GGGCACCACCGTGACCGTGTCTAGCGCTTCTACCAA |
| | | GGGCCCCAGCGTGTTCCCTCTGGCCCCTAGCAGCAA |
| | | GAGCACATCTGGCGGAACAGCCGCCCTGGGCTGCCT |
| | | CGTGAAGGACTACTTTCCCGAGCCCGTGACAGTGTC |
| | | CTGGAACTCTGGCGCCCTGACAAGCGGCGTGCACAC |
| | | CTTTCCAGCCGTGCTCCAGAGCAGCGGCCTGTACTC |
| | | TCTGAGCAGCGTCGTGACTGTGCCCAGCAGCAGCCT |
| | | GGGAACCCAGACCTACATCTGCAACGTGAACCACAA |
| | | GCCCAGCAACACCAAGGTGGACAAGAAGGTGGAAC |
| | | CCAAGAGCTGCGACGGCGGAGGCGGATCTGGCGGC |
| | | GGAGGATCCCAGGTGCAGCTGGTGCAGAGCGGAGC |
| | | TGAAGTGAAAAAGCCTGGCTCCTCCGTGAAAGTGTC |
| | | TTGTAAAGCCAGCGGCGGCACATTCTCTAGCTATGC |
| | | CATCAGCTGGGTGCGGCAGGCTCCAGGCCAGGGACT |
| | | GGAATGGATGGGAGGAATTATCCCTATTTTTGGGAC |
| | | AGCCAATTATGCTCAGAAATTTCAGGGGCGCGTGAC |
| | | AATTACAGCCGACAAGTCCACCTCTACAGCTTATAT |
| | | GGAACTGTCCTCCCTGCGCTCCGAGGATACAGCTGT |
| | | GTATTACTGCGCTCGGGGCTATTATGCCATTGATTAT |
| | | TGGGGACAGGGAACAACAGTGACTGTGTCCTCCGCT |
| | | AGCACCAAGGGCCCATCGGTCTTCCCCCTGGCACCC |
| | | TCCTCCAAGAGCACCTCTGGGGGCACAGCGGCCCTG |
| | | GGCTGCCTGGTCAAGGACTACTTCCCCGAACCGGTG |
| | | ACGGTGTCGTGGAACTCAGGCGCCCTGACCAGCGGC |
| | | GTGCACACCTTCCCGGCTGTCCTACAGTCCTCAGGA |
| | | CTCTACTCCCTCAGCAGCGTGGTGACCGTGCCCTCC |
| | | AGCAGCTTGGGCACCCAGACCTACATCTGCAACGTG |
| | | AATCACAAGCCCAGCAACACCAAGGTGGACAAGAA |
| | | AGTTGAGCCCAAATCTTGTGACAAAACTCACACATG |
| | | CCCACCGTGCCCAGCACCTGAAGCTGCAGGGGGACC |
| | | GTCAGTCTTCCTCTTCCCCCCAAAACCCAAGGACAC |
| | | CCTCATGATCTCCCGGACCCCTGAGGTCACATGCGT |
| | | GGTGGTGGACGTGAGCCACGAAGACCCTGAGGTCA |
| | | AGTTCAACTGGTACGTGGACGGCGTGGAGGTGCATA |
| | | ATGCCAAGACAAAGCCGCGGGAGGAGCAGTACAAC |
| | | AGCACGTACCGTGTGGTCAGCGTCCTCACCGTCCTG |
| | | CACCAGGACTGGCTGAATGGCAAGGAGTACAAGTG |
| | | CAAGGTCTCCAACAAAGCCCTCGGCGCCCCCATCGA |
| | | GAAAACCATCTCCAAAGCCAAAGGGCAGCCCCGAG |
| | | AACCACAGGTGTGCACCCTGCCCCCATCCCGGGATG |
| | | AGCTGACCAAGAACCAGGTCAGCCTCTCGTGCGCAG |
| | | TCAAAGGCTTCTATCCCAGCGACATCGCCGTGGAGT |
| | | GGGAGAGCAATGGGCAGCCGGAGAACAACTACAAG |
| | | ACCACGCCTCCCGTGCTGGACTCCGACGGCTCCTTCT |
| | | TCCTCGTGAGCAAGCTCACCGTGGACAAGAGCAGGT |
| | | GGCAGCAGGGGAACGTCTTCTCATGCTCCGTGATGC |
| | | ATGAGGCTCTGCACAACCACTACACGCAGAAGAGCC |
| | | TCTCCCTGTCTCCGGGTGGAGGCGGCGGAAGCGGAG |
| | | GAGGAGGATCCGGTGGTGGCGGATCTGGGGGCGGT |
| | | GGATCTGAGATCGTGCTGACCCAGTCTCCCGGCACC |
| | | CTGAGCCTGAGCCCTGGCGAGAGAGCCACCCTGAGC |
| | | TGCAGAGCCAGCCAGAGCGTGAGCCGGAGCTACCT |
| | | GGCCTGGTATCAGCAGAAGCCCGGCCAGGCCCCCAG |
| | | ACTGCTGATCATCGGCGCCAGCACCCGGGCCACCGG |
| | | CATCCCCGATAGATTCAGCGGCAGCGGCTCCGGCAC |
| | | CGACTTCACCCTGACCATCAGCCGGCTGGAACCCGA |
| | | GGACTTCGCCGTGTACTACTGCCAGCAGGGCCAGGT |
| | | GATCCCCCCCACCTTCGGCCAGGGCACCAAGGTGGA |
| | | AATCAAG |
| 393 | (8A06) VLCL-light | SSELTQDPAVSVALGQTVRITCQGDSLRSYYASWYQQ |
| | chain | KPGQAPVLVIYGKNNRPSGIPDRFSGSSSGNTASLTITG |
| | | AQAEDEADYYCNSPQTSGSAVFGGGTKLTVLGQPKAA |
| | | PSVTLFPPSSEELQANKATLVCLISDFYPGAVTVAWKA |
| | | DSSPVKAGVETTTPSKQSNNKYAASSYLSLTPEQWKS |
| | | HRSYSCQVTHEGSTVEKTVAPTECS |
| 401 | HC 1 | QVQLVQSGAEVKKPGSSVKVSCKASGGTFSSYAISWV |
| | (8A06) | RQAPGQGLEWMGGIIPIFGTANYAQKFQGRVTITADKS |
| | VHCH1_VHCH1 Fc | TSTAYMELSSLRSEDTAVYYCARGYYAIDYWGQGTTV |
| | knob VH (28H1) | TVSSASTKGPSVFPLAPSSKSTSGGTAALGCLVKDYFPE |
| | | PVTVSWNSGALTSGVHTFPAVLQSSGLYSLSSVVTVPS |
| | | SSLGTQTYICNVNHKPSNTKVDKKVEPKSCDGGGGSG |
| | | GGGSQVQLVQSGAEVKKPGSSVKVSCKASGGTFSSYA |
| | | ISWVRQAPGQGLEWMGGIIPIFGTANYAQKFQGRVTIT |
| | | ADKSTSTAYMELSSLRSEDTAVYYCARGYYAIDYWG |
| | | QGTTVTVSSASTKGPSVFPLAPSSKSTSGGTAALGCLV |
| | | KDYFPEPVTVSWNSGALTSGVHTFPAVLQSSGLYSLSS |
| | | VVTVPSSSLGTQTYICNVNHKPSNTKVDKKVEPKSCD |
| | | KTHTCPPCPAPEAAGGPSVFLFPPKPKDTLMISRTPEVT |
| | | CVVVDVSHEDPEVKFNWYVDGVEVHNAKTKPREEQY |
| | | NSTYRVVSVLTVLHQDWLNGKEYKCKVSNKALGAPIE |
| | | KTISKAKGQPREPQVYTLPPCRDELTKNQVSLWCLVK |
| | | GFYPSDIAVEWESNGQPENNYKTTPPVLDSDGSFFLYS |
| | | KLTVDKSRWQQGNVFSCSVMHEALHNHYTQKSLSLSP |
| | | GGGGGSGGGGSGGGGSGGGGSEVQLLESGGGLVQPG |
| | | GSLRLSCAASGFTFSSHAMSWVRQAPGKGLEWVSAIW |
| | | ASGEQYYADSVKGRFTISRDNSKNTLYLQMNSLRAED |
| | | TAVYYCAKGWLGNFDYWGQGTLVTVSS |
| 402 | HC 2 | QVQLVQSGAEVKKPGSSVKVSCKASGGTFSSYAISWV |
| | (8A06) | RQAPGQGLEWMGGIIPIFGTANYAQKFQGRVTITADKS |
| | VHCH1_VHCH1 Fc | TSTAYMELSSLRSEDTAVYYCARGYYAIDYWGQGTTV |
| | hole VL (28H1) | TVSSASTKGPSVFPLAPSSKSTSGGTAALGCLVKDYFPE |
| | | PVTVSWNSGALTSGVHTFPAVLQSSGLYSLSSVVTVPS |
| | | SSLGTQTYICNVNHKPSNTKVDKKVEPKSCDGGGGSG |
| | | GGGSQVQLVQSGAEVKKPGSSVKVSCKASGGTFSSYA |
| | | ISWVRQAPGQGLEWMGGIIPIFGTANYAQKFQGRVTIT |
| | | ADKSTSTAYMELSSLRSEDTAVYYCARGYYAIDYWG |
| | | QGTTVTVSSASTKGPSVFPLAPSSKSTSGGTAALGCLV |
| | | KDYFPEPVTVSWNSGALTSGVHTFPAVLQSSGLYSLSS |
| | | VVTVPSSSLGTQTYICNVNHKPSNTKVDKKVEPKSCD |
| | | KTHTCPPCPAPEAAGGPSVFLFPPKPKDTLMISRTPEVT |
| | | CVVVDVSHEDPEVKFNWYVDGVEVHNAKTKPREEQY |
| | | NSTYRVVSVLTVLHQDWLNGKEYKCKVSNKALGAPIE |
| | | KTISKAKGQPREPQVCTLPPSRDELTKNQVSLSCAVKG |
| | | FYPSDIAVEWESNGQPENNYKTTPPVLDSDGSFFLVSK |
| | | LTVDKSRWQQGNVFSCSVMHEALHNHYTQKSLSLSPG |
| | | GGGGSGGGGSGGGGSGGGGSEIVLTQSPGTLSLSPGER |
| | | ATLSCRASQSVSRSYLAWYQQKPGQAPRLLIIGASTRA |
| | | TGIPDRFSGSGSGTDFTLTISRLEPEDFAVYYCQQGQVI |
| | | PPTFGQGTKVEIK |
| 395 | (6C8) VLCL-light chain | GAGATCGTGATGACCCAGTCCCCCGCCACCCTGTCC |
| | (nucleotide sequence) | GTGTCTCCAGGCGAGAGAGCCACCCTGAGCTGCAAG |
| | | GCCTCCCAGAACGTGGGCACCAACGTGGCCTGGTAT |
| | | CAGCAGAAGCCCGGCCAGGCCCCTCGGCTGCTGATC |
| | | TACTCCGCCTCCTACCGGTACTCCGGCATCCCTGCCC |
| | | GGTTCTCCGGCTCTGGCTCTGGCACCGAGTTTACCCT |
| | | GACCATCTCCAGCCTGCAGTCCGAGGACTTCGCCGT |
| | | GTACTACTGCCAGCAGTACAACACCGACCCCCTGAC |
| | | CTTCGGCGGAGGCACCAAGGTGGAAATCAAACGTA |
| | | CGGTGGCTGCACCATCTGTCTTCATCTTCCCGCCATC |
| | | TGATGAGCAGTTGAAATCTGGAACTGCCTCTGTTGT |
| | | GTGCCTGCTGAATAACTTCTATCCCAGAGAGGCCAA |
| | | AGTACAGTGGAAGGTGGATAACGCCCTCCAATCGGG |
| | | TAACTCCCAGGAGAGTGTCACAGAGCAGGACAGCA |
| | | AGGACAGCACCTACAGCCTCAGCAGCACCCTGACGC |
| | | TGAGCAAAGCAGACTACGAGAAACACAAAGTCTAC |
| | | GCCTGCGAAGTCACCCATCAGGGCCTGAGCTCGCCC |
| | | GTCACAAAGAGCTTCAACAGGGGAGAGTGT |
| 403 | HC 1 | CAGGTCACACTGAGAGAGTCCGGCCCTGCCCTGGTC |
| | (6C8) VHCH1_VHCH1 | AAGCCCACCCAGACCCTGACCCTGACATGCACCTTC |
| | Fc knob VH (28H1) | TCCGGCTTCTCCCTGTCCACCTCCGGCATGGGCGTGG |
| | (nucleotide sequence) | GCTGGATCAGACAGCCTCCTGGCAAGGCCCTGGAAT |
| | | GGCTGGCCCACATTTGGTGGGACGACGACAAGTACT |
| | | ACCAGCCCTCCCTGAAGTCCCGGCTGACCATCTCCA |
| | | AGGACACCTCCAAGAACCAGGTGGTGCTGACCATGA |
| | | CCAACATGGACCCCGTGGACACCGCCACCTACTACT |
| | | GCGCCCGGACCCGGCGGTACTTCCCCTTTGCTTATTG |
| | | GGGCCAGGGCACCCTGGTCACCGTCTCGAGCGCTTC |
| | | TACCAAGGGCCCCAGCGTGTTCCCTCTGGCCCCTAG |
| | | CAGCAAGAGCACATCTGGCGGAACAGCCGCCCTGG |
| | | GCTGCCTCGTGAAGGACTACTTTCCCGAGCCCGTGA |
| | | CAGTGTCCTGGAACTCTGGCGCCCTGACAAGCGGCG |
| | | TGCACACCTTTCCAGCCGTGCTCCAGAGCAGCGGCC |
| | | TGTACTCTCTGAGCAGCGTCGTGACTGTGCCCAGCA |
| | | GCAGCCTGGGAACCCAGACCTACATCTGCAACGTGA |
| | | ACCACAAGCCCAGCAACACCAAGGTGGACAAGAAG |
| | | GTGGAACCCAAGAGCTGCGACGGCGGAGGCGGATC |
| | | TGGCGGCGGAGGATCCCAGGTCACACTGAGAGAGT |
| | | CCGGCCCTGCCCTGGTCAAGCCCACCCAGACCCTGA |
| | | CCCTGACATGCACCTTCTCCGGCTTCTCCCTGTCCAC |
| | | CTCCGGCATGGGCGTGGGCTGGATCAGACAGCCTCC |
| | | TGGCAAGGCCCTGGAATGGCTGGCCCACATTTGGTG |
| | | GGACGACGACAAGTACTACCAGCCCTCCCTGAAGTC |
| | | CCGGCTGACCATCTCCAAGGACACCTCCAAGAACCA |
| | | GGTGGTGCTGACCATGACCAACATGGACCCCGTGGA |
| | | CACCGCCACCTACTACTGCGCCCGGACCCGGCGGTA |
| | | CTTCCCCTTTGCTTATTGGGGCCAGGGCACCCTGGTC |
| | | ACCGTCTCGAGTGCTAGCACCAAGGGCCCATCGGTC |
| | | TTCCCCCTGGCACCCTCCTCCAAGAGCACCTCTGGG |
| | | GGCACAGCGGCCCTGGGCTGCCTGGTCAAGGACTAC |
| | | TTCCCCGAACCGGTGACGGTGTCGTGGAACTCAGGC |
| | | GCCCTGACCAGCGGCGTGCACACCTTCCCGGCTGTC |
| | | CTACAGTCCTCAGGACTCTACTCCCTCAGCAGCGTG |
| | | GTGACCGTGCCCTCCAGCAGCTTGGGCACCCAGACC |
| | | TACATCTGCAACGTGAATCACAAGCCCAGCAACACC |
| | | AAGGTGGACAAGAAAGTTGAGCCCAAATCTTGTGAC |
| | | AAAACTCACACATGCCCACCGTGCCCAGCACCTGAA |
| | | GCTGCAGGGGGACCGTCAGTCTTCCTCTTCCCCCCA |
| | | AAACCCAAGGACACCCTCATGATCTCCCGGACCCCT |
| | | GAGGTCACATGCGTGGTGGTGGACGTGAGCCACGA |
| | | AGACCCTGAGGTCAAGTTCAACTGGTACGTGGACGG |
| | | CGTGGAGGTGCATAATGCCAAGACAAAGCCGCGGG |
| | | AGGAGCAGTACAACAGCACGTACCGTGTGGTCAGC |
| | | GTCCTCACCGTCCTGCACCAGGACTGGCTGAATGGC |
| | | AAGGAGTACAAGTGCAAGGTCTCCAACAAAGCCCTC |
| | | GGCGCCCCCATCGAGAAAACCATCTCCAAAGCCAAA |
| | | GGGCAGCCCCGAGAACCACAGGTGTACACCCTGCCC |
| | | CCCTGCAGAGATGAGCTGACCAAGAACCAGGTGTCC |
| | | CTGTGGTGTCTGGTCAAGGGCTTCTACCCCAGCGAT |
| | | ATCGCCGTGGAGTGGGAGAGCAACGGCCAGCCTGA |
| | | GAACAACTACAAGACCACCCCCCCTGTGCTGGACAG |
| | | CGACGGCAGCTTCTTCCTGTACTCCAAACTGACCGT |
| | | GGACAAGAGCCGGTGGCAGCAGGGCAACGTGTTCA |
| | | GCTGCAGCGTGATGCACGAGGCCCTGCACAACCACT |
| | | ACACCCAGAAGTCCCTGAGCCTGAGCCCCGGCGGAG |
| | | GCGGCGGAAGCGGAGGAGGAGGATCCGGAGGAGGG |
| | | GGAAGTGGCGGCGGAGGATCTGAGGTGCAGCTGCT |
| | | GGAATCCGGCGGAGGCCTGGTGCAGCCTGGCGGATC |
| | | TCTGAGACTGTCCTGCGCCGCCTCCGGCTTCACCTTC |
| | | TCCTCCCACGCCATGTCCTGGGTCCGACAGGCTCCT |
| | | GGCAAAGGCCTGGAATGGGTGTCCGCCATCTGGGCC |
| | | TCCGGCGAGCAGTACTACGCCGACTCTGTGAAGGGC |
| | | CGGTTCACCATCTCCCGGGACAACTCCAAGAACACC |
| | | CTGTACCTGCAGATGAACTCCCTGCGGGCCGAGGAC |
| | | ACCGCCGTGTACTACTGTGCCAAGGGCTGGCTGGGC |
| | | AACTTCGACTACTGGGGCCAGGGCACCCTGGTCACC |
| | | GTGTCCAGC |
| 404 | HC 2 | CAGGTCACACTGAGAGAGTCCGGCCCTGCCCTGGTC |
| | (6C8) VHCH1_VHCH1 | AAGCCCACCCAGACCCTGACCCTGACATGCACCTTC |
| | Fc hole VL (28H1) | TCCGGCTTCTCCCTGTCCACCTCCGGCATGGGCGTGG |
| | (nucleotide sequence) | GCTGGATCAGACAGCCTCCTGGCAAGGCCCTGGAAT |
| | | GGCTGGCCCACATTTGGTGGGACGACGACAAGTACT |
| | | ACCAGCCCTCCCTGAAGTCCCGGCTGACCATCTCCA |
| | | AGGACACCTCCAAGAACCAGGTGGTGCTGACCATGA |
| | | CCAACATGGACCCCGTGGACACCGCCACCTACTACT |
| | | GCGCCCGGACCCGGCGGTACTTCCCCTTTGCTTATTG |
| | | GGGCCAGGGCACCCTGGTCACCGTCTCGAGCGCTTC |
| | | TACCAAGGGCCCCAGCGTGTTCCCTCTGGCCCCTAG |
| | | CAGCAAGAGCACATCTGGCGGAACAGCCGCCCTGG |
| | | GCTGCCTCGTGAAGGACTACTTTCCCGAGCCCGTGA |
| | | CAGTGTCCTGGAACTCTGGCGCCCTGACAAGCGGCG |
| | | TGCACACCTTTCCAGCCGTGCTCCAGAGCAGCGGCC |
| | | TGTACTCTCTGAGCAGCGTCGTGACTGTGCCCAGCA |
| | | GCAGCCTGGGAACCCAGACCTACATCTGCAACGTGA |
| | | ACCACAAGCCCAGCAACACCAAGGTGGACAAGAAG |
| | | GTGGAACCCAAGAGCTGCGACGGCGGAGGCGGATC |
| | | TGGCGGCGGAGGATCCCAGGTCACACTGAGAGAGT |
| | | CCGGCCCTGCCCTGGTCAAGCCCACCCAGACCCTGA |
| | | CCCTGACATGCACCTTCTCCGGCTTCTCCCTGTCCAC |
| | | CTCCGGCATGGGCGTGGGCTGGATCAGACAGCCTCC |
| | | TGGCAAGGCCCTGGAATGGCTGGCCCACATTTGGTG |
| | | GGACGACGACAAGTACTACCAGCCCTCCCTGAAGTC |
| | | CCGGCTGACCATCTCCAAGGACACCTCCAAGAACCA |
| | | GGTGGTGCTGACCATGACCAACATGGACCCCGTGGA |
| | | CACCGCCACCTACTACTGCGCCCGGACCCGGCGGTA |
| | | CTTCCCCTTTGCTTATTGGGGCCAGGGCACCCTGGTC |
| | | ACCGTCTCGAGTGCTAGCACCAAGGGCCCATCGGTC |
| | | TTCCCCCTGGCACCCTCCTCCAAGAGCACCTCTGGG |
| | | GGCACAGCGGCCCTGGGCTGCCTGGTCAAGGACTAC |
| | | TTCCCCGAACCGGTGACGGTGTCGTGGAACTCAGGC |
| | | GCCCTGACCAGCGGCGTGCACACCTTCCCGGCTGTC |
| | | CTACAGTCCTCAGGACTCTACTCCCTCAGCAGCGTG |
| | | GTGACCGTGCCCTCCAGCAGCTTGGGCACCCAGACC |
| | | TACATCTGCAACGTGAATCACAAGCCCAGCAACACC |
| | | AAGGTGGACAAGAAAGTTGAGCCCAAATCTTGTGAC |
| | | AAAACTCACACATGCCCACCGTGCCCAGCACCTGAA |
| | | GCTGCAGGGGGACCGTCAGTCTTCCTCTTCCCCCCA |
| | | AAACCCAAGGACACCCTCATGATCTCCCGGACCCCT |
| | | GAGGTCACATGCGTGGTGGTGGACGTGAGCCACGA |
| | | AGACCCTGAGGTCAAGTTCAACTGGTACGTGGACGG |
| | | CGTGGAGGTGCATAATGCCAAGACAAAGCCGCGGG |
| | | AGGAGCAGTACAACAGCACGTACCGTGTGGTCAGC |
| | | GTCCTCACCGTCCTGCACCAGGACTGGCTGAATGGC |
| | | AAGGAGTACAAGTGCAAGGTCTCCAACAAAGCCCTC |
| | | GGCGCCCCCATCGAGAAAACCATCTCCAAAGCCAAA |
| | | GGGCAGCCCCGAGAACCACAGGTGTGCACCCTGCCC |
| | | CCATCCCGGGATGAGCTGACCAAGAACCAGGTCAGC |
| | | CTCTCGTGCGCAGTCAAAGGCTTCTATCCCAGCGAC |
| | | ATCGCCGTGGAGTGGGAGAGCAATGGGCAGCCGGA |
| | | GAACAACTACAAGACCACGCCTCCCGTGCTGGACTC |
| | | CGACGGCTCCTTCTTCCTCGTGAGCAAGCTCACCGT |
| | | GGACAAGAGCAGGTGGCAGCAGGGGAACGTCTTCT |
| | | CATGCTCCGTGATGCATGAGGCTCTGCACAACCACT |
| | | ACACGCAGAAGAGCCTCTCCCTGTCTCCGGGTGGAG |
| | | GCGGCGGAAGCGGAGGAGGAGGATCCGGTGGTGGC |
| | | GGATCTGGGGGCGGTGGATCTGAGATCGTGCTGACC |
| | | CAGTCTCCCGGCACCCTGAGCCTGAGCCCTGGCGAG |
| | | AGAGCCACCCTGAGCTGCAGAGCCAGCCAGAGCGT |
| | | GAGCCGGAGCTACCTGGCCTGGTATCAGCAGAAGCC |
| | | CGGCCAGGCCCCCAGACTGCTGATCATCGGCGCCAG |
| | | CACCCGGGCCACCGGCATCCCCGATAGATTCAGCGG |
| | | CAGCGGCTCCGGCACCGACTTCACCCTGACCATCAG |
| | | CCGGCTGGAACCCGAGGACTTCGCCGTGTACTACTG |
| | | CCAGCAGGGCCAGGTGATCCCCCCCACCTTCGGCCA |
| | | GGGCACCAAGGTGGAAATCAAG |
| 397 | (6C8) VLCL-light chain | EIVMTQSPATLSVSPGERATLSCKASQNVGTNVAWYQ |
| | | QKPGQAPRLLIYSASYRYSGIPARFSGSGSGTEFTLTISS |
| | | LQSEDFAVYYCQQYNTDPLTFGGGTKVEIKRTVAAPS |
| | | VFIFPPSDEQLKSGTASVVCLLNNFYPREAKVQWKVD |
| | | NALQSGNSQESVTEQDSKDSTYSLSSTLTLSKADYEKH |
| | | KVYACEVTHQGLSSPVTKSFNRGEC |
| 405 | HC 1 | QVTLRESGPALVKPTQTLTLTCTFSGFSLSTSGMGVGW |
| | (6C8) VHCH1_VHCH1 | IRQPPGKALEWLAHIWWDDDKYYQPSLKSRLTISKDTS |
| | Fc knob VH (28H1) | KNQVVLTMTNMDPVDTATYYCARTRRYFPFAYWGQ |
| | | GTLVTVSSASTKGPSVFPLAPSSKSTSGGTAALGCLVK |
| | | DYFPEPVTVSWNSGALTSGVHTFPAVLQSSGLYSLSSV |
| | | VTVPSSSLGTQTYICNVNHKPSNTKVDKKVEPKSCDG |
| | | GGGSGGGGSQVTLRESGPALVKPTQTLTLTCTFSGFSL |
| | | STSGMGVGWIRQPPGKALEWLAHIWWDDDKYYQPSL |
| | | KSRLTISKDTSKNQVVLTMTNMDPVDTATYYCARTRR |
| | | YFPFAYWGQGTLVTVSSASTKGPSVFPLAPSSKSTSGG |
| | | TAALGCLVKDYFPEPVTVSWNSGALTSGVHTFPAVLQ |
| | | SSGLYSLSSVVTVPSSSLGTQTYICNVNHKPSNTKVDK |
| | | KVEPKSCDKTHTCPPCPAPEAAGGPSVFLFPPKPKDTL |
| | | MISRTPEVTCVVVDVSHEDPEVKFNWYVDGVEVHNA |
| | | KTKPREEQYNSTYRVVSVLTVLHQDWLNGKEYKCKV |
| | | SNKALGAPIEKTISKAKGQPREPQVYTLPPCRDELTKN |
| | | QVSLWCLVKGFYPSDIAVEWESNGQPENNYKTTPPVL |
| | | DSDGSFFLYSKLTVDKSRWQQGNVFSCSVMHEALHN |
| | | HYTQKSLSLSPGGGGGSGGGGSGGGGSGGGGSEVQLL |
| | | ESGGGLVQPGGSLRLSCAASGFTFSSHAMSWVRQAPG |
| | | KGLEWVSAIWASGEQYYADSVKGRFTISRDNSKNTLY |
| | | LQMNSLRAEDTAVYYCAKGWLGNFDYWGQGTLVTV |
| | | SS |
| 406 | HC 2 | QVTLRESGPALVKPTQTLTLTCTFSGFSLSTSGMGVGW |
| | (6C8) VHCH1_VHCH1 | IRQPPGKALEWLAHIWWDDDKYYQPSLKSRLTISKDTS |
| | Fc hole VL (28H1) | KNQVVLTMTNMDPVDTATYYCARTRRYFPFAYWGQ |
| | | GTLVTVSSASTKGPSVFPLAPSSKSTSGGTAALGCLVK |
| | | DYFPEPVTVSWNSGALTSGVHTFPAVLQSSGLYSLSSV |
| | | VTVPSSSLGTQTYICNVNHKPSNTKVDKKVEPKSCDG |
| | | GGGSGGGGSQVTLRESGPALVKPTQTLTLTCTFSGFSL |
| | | STSGMGVGWIRQPPGKALEWLAHIWWDDDKYYQPSL |
| | | KSRLTISKDTSKNQVVLTMTNMDPVDTATYYCARTRR |
| | | YFPFAYWGQGTLVTVSSASTKGPSVFPLAPSSKSTSGG |
| | | TAALGCLVKDYFPEPVTVSWNSGALTSGVHTFPAVLQ |
| | | SSGLYSLSSWTVPSSSLGTQTYICNVNHKPSNTKVDK |
| | | KVEPKSCDKTHTCPPCPAPEAAGGPSVFLFPPKPKDTL |
| | | MISRTPEVTCVVVDVSHEDPEVKFNWYVDGVEVHNA |
| | | KTKPREEQYNSTYRVVSVLTVLHQDWLNGKEYKCKV |
| | | SNKALGAPIEKTISKAKGQPREPQVCTLPPSRDELTKNQ |
| | | VSLSCAVKGFYPSDIAVEWESNGQPENNYKTTPPVLDS |
| | | DGSFFLVSKLTVDKSRWQQGNVFSCSVMHEALHNHY |
| | | TQKSLSLSPGGGGGSGGGGSGGGGSGGGGSEIVLTQSP |
| | | GTLSLSPGERATLSGRASQSVSRSYLAWYQQKPGQAP |
| | | RLLIIGASTRATGIPDRFSGSGSGTDFTLTISRLEPEDFA |
| | | VYYCQQGQVIPPTFGQGTKVEIK |

[0970] Bispecific agonistic GITR antibodies with tetravalent binding for GITR and with bivalent binding for FAP (4+2 constructs) were also prepared. The crossmab technology in accordance with International patent application No. WO 2010/145792 A1 was applied to reduce the formation of wrongly paired light chains. In this example, a crossed Fab unit (VHCL) of the FAP binder 28H1 was fused to the C-terminus of the Fc part of both heavy chains. Two Fabs against GITR were fused to the N-terminus of each heavy chain as described in Example 4.2. In this case the introduction of a knob into hole was not necessary as both heavy chains contained the same domains.

[0971] The Pro329Gly, Leu234Ala and Leu235Ala mutations were introduced in the constant region of the heavy chains to abrogate binding to Fc gamma receptors according to the method described in International Patent Appl. Publ. No. WO 2012/130831 A1. The resulting bispecific, tetravalent construct is depicted in FIG. 53B. Table 84 shows, respectively, the nucleotide and amino acid sequences of mature bispecific, tetravalent anti-OX40/anti-FAP human IgG1 P329GLALA antibodies.

TABLE 84
cDNA and amino acid sequences of mature bispecific 4 + 2
anti-GITR, anti-FAP human IgG1 P329GLALA kih antibodies

| SEQ ID | | |
|---|---|---|
| NO: | Description | Sequence |
| 391 | (8A06) VLCL- | see Table 78 |
| | light chain | |
| | (nucleotide | |
| | sequence) | |
| 407 | heavy chain | CAGGTGCAGCTGGTGCAGTCTGGCGCCGAAGTGAAGA |
| | (8A06) | AACCCGGCAGCAGCGTGAAGGTGTCCTGCAAGGCTTCC |
| | VHCH1_VHCH1 | GGCGGCACCTTCAGCAGCTACGCCATTTCTTGGGTGCG |
| | Fc VHCL (28H1) | CCAGGCCCCTGGACAGGGCCTGGAATGGATGGGCGGC |
| | (nucleotide | ATCATCCCCATCTTCGGCACCGCCAACTACGCCCAGAA |
| | sequence) | ATTCCAGGGCAGAGTGACCATCACCGCCGACAAGAGC |
| | | ACCAGCACCGCCTACATGGAACTGAGCAGCCTGCGGA |
| | | GCGAGGACACCGCCGTGTACTATTGCGCCAGAGGCTAC |
| | | TACGCCATCGACTACTGGGGCCAGGGCACCACCGTGAC |
| | | CGTGTCTAGCGCTTCTACCAAGGGCCCCAGCGTGTTCC |
| | | CTCTGGCCCCTAGCAGCAAGAGCACATCTGGCGGAACA |
| | | GCCGCCCTGGGCTGCCTCGTGAAGGACTACTTTCCCGA |
| | | GCCCGTGACAGTGTCCTGGAACTCTGGCGCCCTGACAA |
| | | GCGGCGTGCACACCTTTCCAGCCGTGCTCCAGAGCAGC |
| | | GGCCTGTACTCTCTGAGCAGCGTCGTGACTGTGCCCAG |
| | | CAGCAGCCTGGGAACCCAGACCTACATCTGCAACGTGA |
| | | ACCACAAGCCCAGCAACACCAAGGTGGACAAGAAGGT |
| | | GGAACCCAAGAGCTGCGACGGCGGAGGCGGATCTGGC |
| | | GGCGGAGGATCCCAGGTGCAGCTGGTGCAGAGCGGAG |
| | | CTGAAGTGAAAAAGCCTGGCTCCTCCGTGAAAGTGTCT |
| | | TGTAAAGCCAGCGGCGGCACATTCTCTAGCTATGCCAT |
| | | CAGCTGGGTGCGGCAGGCTCCAGGCCAGGGACTGGAA |
| | | TGGATGGGAGGAATTATCCCTATTTTTGGGACAGCCAA |
| | | TTATGCTCAGAAATTTCAGGGGCGCGTGACAATTACAG |
| | | CCGACAAGTCCACCTCTACAGCTTATATGGAACTGTCC |
| | | TCCCTGCGCTCCGAGGATACAGCTGTGTATTACTGCGC |
| | | TCGGGGCTATTATGCCATTGATTATTGGGGACAGGGAA |
| | | CAACAGTGACTGTGTCCTCCGCTAGCACCAAGGGCCCA |
| | | TCCGTGTTCCCTCTGGCCCCTTCCAGCAAGTCTACCTCT |
| | | GGCGGCACAGCCGCTCTGGGCTGCCTCGTGAAGGACTA |
| | | CTTCCCCGAGCCTGTGACAGTGTCCTGGAACTCTGGCG |
| | | CCCTGACATCCGGCGTGCACACCTTTCCAGCTGTGCTG |
| | | CAGTCCTCCGGCCTGTACTCCCTGTCCTCCGTCGTGACA |
| | | GTGCCCTCCAGCTCTCTGGGCACCCAGACCTACATCTG |
| | | CAACGTGAACCACAAGCCCTCCAACACCAAGGTGGAC |
| | | AAGAAGGTGGAACCCAAGTCCTGCGACAAGACCCACA |
| | | CCTGTCCCCCTTGTCCTGCCCCTGAAGCTGCTGGCGGCC |
| | | CTAGCGTGTTCCTGTTCCCCCCAAAGCCCAAGGACACC |
| | | CTGATGATCTCCCGGACCCCCGAAGTGACCTGCGTGGT |
| | | GGTGGATGTGTCCCACGAGGACCCTGAAGTGAAGTTCA |
| | | ATTGGTACGTGGACGGCGTGGAAGTGCACAATGCCAA |
| | | GACCAAGCCTAGAGAGGAACAGTACAACTCCACCTAC |
| | | CGGGTGGTGTCCGTGCTGACCGTGCTGCACCAGGATTG |
| | | GCTGAACGGCAAAGAGTACAAGTGCAAGGTGTCCAAC |
| | | AAGGCCCTGGGAGCCCCCATCGAAAAGACCATCTCCA |
| | | AGGCCAAGGGCCAGCCTCGCGAGCCTCAGGTGTACAC |
| | | CCTGCCCCCTAGCAGAGATGAGCTGACCAAGAACCAG |
| | | GTGTCCCTGACCTGTCTCGTGAAAGGCTTCTACCCCTCC |
| | | GATATCGCCGTGGAATGGGAGAGCAACGGCCAGCCCG |
| | | AGAACAACTACAAGACCACCCCCCCTGTGCTGGACTCC |
| | | GACGGCTCATTCTTCCTGTACTCTAAGCTGACAGTGGA |
| | | CAAGTCCCGGTGGCAGCAGGGCAACGTGTTCTCCTGCT |
| | | CCGTGATGCACGAGGCCCTGCACAACCACTACACCCAG |
| | | AAGTCCCTGTCCCTGTCTCCCGGGGGAGGCGGAGGATC |
| | | TGGCGGAGGCGGATCCGGTGGTGGCGGATCTGGGGGC |
| | | GGTGGATCTGAGGTGCAGCTGCTGGAATCTGGGGGAG |
| | | GACTGGTGCAGCCAGGCGGATCTCTGAGGCTGTCCTGC |
| | | GCTGCTTCCGGCTTTACCTTCTCCAGCCACGCCATGAGT |
| | | TGGGTGCGCCAGGCACCCGGAAAAGGACTGGAATGGG |
| | | TGTCAGCCATCTGGGCCTCCGGCGAGCAGTACTACGCC |
| | | GATAGCGTGAAGGGCCGGTTCACCATCTCTCGGGATAA |
| | | CAGCAAGAATACTCTGTACCTGCAGATGAACTCCCTGC |
| | | GCGCTGAAGATACCGCTGTGTATTACTGCGCCAAGGGC |
| | | TGGCTGGGCAACTTCGATTACTGGGGCCAGGGAACCCT |
| | | CGTGACTGTCTCGAGCGCTTCTGTGGCCGCTCCCTCCGT |
| | | GTTCATCTTCCCACCTTCCGACGAGCAGCTGAAGTCCG |
| | | GCACTGCCTCTGTCGTGTGCCTGCTGAACAACTTCTACC |
| | | CTCGGGAAGCCAAGGTGCAGTGGAAAGTGGATAACGC |
| | | CCTGCAGTCCGGCAACTCCCAGGAATCCGTGACCGAGC |
| | | AGGACTCCAAGGACAGCACCTACTCCCTGAGCAGCACC |
| | | CTGACCCTGTCCAAGGCCGACTACGAGAAGCACAAGG |
| | | TGTACGCCTGTGAAGTGACCCACCAGGGCCTGTCCAGC |
| | | CCCGTGACCAAGTCCTTCAACCGGGGCGAGTGC |
| 408 | (28H1) VLCH1- | GAGATCGTGCTGACCCAGTCTCCCGGCACCCTGAGCCT |
| | light chain 2 | GAGCCCTGGCGAGAGAGCCACCCTGAGCTGCAGAGCC |
| | (nucleotide | AGCCAGAGCGTGAGCCGGAGCTACCTGGCCTGGTATCA |
| | sequence) | GCAGAAGCCCGGCCAGGCCCCCAGACTGCTGATCATCG |
| | | GCGCCAGCACCCGGGCCACCGGCATCCCCGATAGATTC |
| | | AGCGGCAGCGGCTCCGGCACCGACTTCACCCTGACCAT |
| | | CAGCCGGCTGGAACCCGAGGACTTCGCCGTGTACTACT |
| | | GCCAGCAGGGCCAGGTGATCCCCCCCACCTTCGGCCAG |
| | | GGCACCAAGGTGGAAATCAAGAGCAGCGCTTCCACCA |
| | | AAGGCCCTTCCGTGTTTCCTCTGGCTCCTAGCTCCAAGT |
| | | CCACCTCTGGAGGCACCGCTGCTCTCGGATGCCTCGTG |
| | | AAGGATTATTTTCCTGAGCCTGTGACAGTGTCCTGGAA |
| | | TAGCGGAGCACTGACCTCTGGAGTGCATACTTTCCCCG |
| | | CTGTGCTGCAGTCCTCTGGACTGTACAGCCTGAGCAGC |
| | | GTGGTGACAGTGCCCAGCAGCAGCCTGGGCACCCAGA |
| | | CCTACATCTGCAACGTGAACCACAAGCCCAGCAACACC |
| | | AAGGTGGACAAGAAGGTGGAACCCAAGTCTTGT |
| 393 | (8A06) VLCL- | see Table 78 |
| | light chain | |
| 409 | heavy chain | QVQLVQSGAEVKKPGSSVKVSCKASGGTFSSYAISWVRQ |
| | (8A06) | APGQGLEWMGGIIPIFGTANYAQKFQGRVTITADKSTSTA |
| | VHCH1_VHCH1 | YMELSSLRSEDTAVYYCARGYYAIDYWGQGTTVTVSSAS |
| | Fc VHCL (28H1) | TKGPSVFPLAPSSKSTSGGTAALGCLVKDYFPEPVTVSWN |
| | | SGALTSGVHTFPAVLQSSGLYSLSSVVTVPSSSLGTQTYIC |
| | | NVNHKPSNTKVDKKVEPKSCDGGGGSGGGGSQVQLVQS |
| | | GAEVKKPGSSVKVSCKASGGTFSSYAISWVRQAPGQGLE |
| | | WMGGIIPIFGTANYAQKFQGRVTITADKSTSTAYMELSSL |
| | | RSEDTAVYYCARGYYAIDYWGQGTTVTVSSASTKGPSVF |
| | | PLAPSSKSTSGGTAALGCLVKDYFPEPVTVSWNSGALTSG |
| | | VHTFPAVLQSSGLYSLSSVVTVPSSSLGTQTYICNVNHKPS |
| | | NTKVDKKVEPKSCDKTHTCPPCPAPEAAGGPSVFLFPPKP |
| | | KDTLMISRTPEVTCVVVDVSHEDPEVKFNWYVDGVEVH |
| | | NAKTKPREEQYNSTYRVVSVLTVLHQDWLNGKEYKCKV |
| | | SNKALGAPIEKTISKAKGQPREPQVYTLPPSRDELTKNQV |
| | | SLTCLVKGFYPSDIAVEWESNGQPENNYKTTPPVLDSDGS |
| | | FFLYSKLTVDKSRWQQGNVFSCSVMHEALHNHYTQKSLS |
| | | LSPGGGGGSGGGGSGGGGSGGGGSEVQLLESGGGLVQPG |
| | | GSLRLSCAASGFTFSSHAMSWVRQAPGKGLEWVSAIWAS |
| | | GEQYYADSVKGRFTISRDNSKNTLYLQMNSLRAEDTAVY |
| | | YCAKGWLGNFDYWGQGTLVTVSSASVAAPSVFIFPPSDE |
| | | QLKSGTASVVCLLNNFYPREAKVQWKVDNALQSGNSQE |
| | | SVTEQDSKDSTYSLSSTLTLSKADYEKHKVYACEVTHQG |
| | | LSSPVTKSFNRGEC |
| 410 | (28H1) VLCH1- | EIVLTQSPGTLSLSPGERATLSCRASQSVSRSYLAWYQQK |
| | light chain 2 | PGQAPRLLIIGASTRATGIPDRFSGSGSGTDFTLTISRLEPE |
| | | DFAVYYCQQGQVIPPTFGQGTKVEIKSSASTKGPSVFPLA |
| | | PSSKSTSGGTAALGCLVKDYFPEPVTVSWNSGALTSGVH |
| | | TFPAVLQSSGLYSLSSVVTVPSSSLGTQTYICNVNHKPSNT |
| | | KVDKKVEPKSC |
| 395 | (6C8) VLCL-light | see Table 78 |
| | chain (nucleotide | |
| | sequence) | |
| 411 | heavy chain | CAGGTCACACTGAGAGAGTCCGGCCCTGCCCTGGTCAA |
| | (6C8) | GCCCACCCAGACCCTGACCCTGACATGCACCTTCTCCG |
| | VHCH1_VHCH1 | GCTTCTCCCTGTCCACCTCCGGCATGGGCGTGGGCTGG |
| | Fc VHCL (28H1) | ATCAGACAGCCTCCTGGCAAGGCCCTGGAATGGCTGGC |
| | (nucleotide | CCACATTTGGTGGGACGACGACAAGTACTACCAGCCCT |
| | sequence) | CCCTGAAGTCCCGGCTGACCATCTCCAAGGACACCTCC |
| | | AAGAACCAGGTGGTGCTGACCATGACCAACATGGACC |
| | | CCGTGGACACCGCCACCTACTACTGCGCCCGGACCCGG |
| | | CGGTACTTCCCCTTTGCTTATTGGGGCCAGGGCACCCT |
| | | GGTCACCGTCTCGAGCGCTTCTACCAAGGGCCCCAGCG |
| | | TGTTCCCTCTGGCCCCTAGCAGCAAGAGCACATCTGGC |
| | | GGAACAGCCGCCCTGGGCTGCCTCGTGAAGGACTACTT |
| | | TCCCGAGCCCGTGACAGTGTCCTGGAACTCTGGCGCCC |
| | | TGACAAGCGGCGTGCACACCTTTCCAGCCGTGCTCCAG |
| | | AGCAGCGGCCTGTACTCTCTGAGCAGCGTCGTGACTGT |
| | | GCCCAGCAGCAGCCTGGGAACCCAGACCTACATCTGCA |
| | | ACGTGAACCACAAGCCCAGCAACACCAAGGTGGACAA |
| | | GAAGGTGGAACCCAAGAGCTGCGACGGCGGAGGCGGA |
| | | TCTGGCGGCGGAGGATCCCAGGTCACACTGAGAGAGT |
| | | CCGGCCCTGCCCTGGTCAAGCCCACCCAGACCCTGACC |
| | | CTGACATGCACCTTCTCCGGCTTCTCCCTGTCCACCTCC |
| | | GGCATGGGCGTGGGCTGGATCAGACAGCCTCCTGGCA |
| | | AGGCCCTGGAATGGCTGGCCCACATTTGGTGGGACGAC |
| | | GACAAGTACTACCAGCCCTCCCTGAAGTCCCGGCTGAC |
| | | CATCTCCAAGGACACCTCCAAGAACCAGGTGGTGCTGA |
| | | CCATGACCAACATGGACCCCGTGGACACCGCCACCTAC |
| | | TACTGCGCCCGGACCCGGCGGTACTTCCCCTTTGCTTAT |
| | | TGGGGCCAGGGCACCCTGGTCACCGTCTCGAGTGCTAG |
| | | CACCAAGGGCCCATCCGTGTTCCCTCTGGCCCCTTCCA |
| | | GCAAGTCTACCTCTGGCGGCACAGCCGCTCTGGGCTGC |
| | | CTCGTGAAGGACTACTTCCCCGAGCCTGTGACAGTGTC |
| | | CTGGAACTCTGGCGCCCTGACATCCGGCGTGCACACCT |
| | | TTCCAGCTGTGCTGCAGTCCTCCGGCCTGTACTCCCTGT |
| | | CCTCCGTCGTGACAGTGCCCTCCAGCTCTCTGGGCACC |
| | | CAGACCTACATCTGCAACGTGAACCACAAGCCCTCCAA |
| | | CACCAAGGTGGACAAGAAGGTGGAACCCAAGTCCTGC |
| | | GACAAGACCCACACCTGTCCCCCTTGTCCTGCCCCTGA |
| | | AGCTGCTGGCGGCCCTAGCGTGTTCCTGTTCCCCCCAA |
| | | AGCCCAAGGACACCCTGATGATCTCCCGGACCCCCGAA |
| | | GTGACCTGCGTGGTGGTGGATGTGTCCCACGAGGACCC |
| | | TGAAGTGAAGTTCAATTGGTACGTGGACGGCGTGGAA |
| | | GTGCACAATGCCAAGACCAAGCCTAGAGAGGAACAGT |
| | | ACAACTCCACCTACCGGGTGGTGTCCGTGCTGACCGTG |
| | | CTGCACCAGGATTGGCTGAACGGCAAAGAGTACAAGT |
| | | GCAAGGTGTCCAACAAGGCCCTGGGAGCCCCCATCGA |
| | | AAAGACCATCTCCAAGGCCAAGGGCCAGCCTCGCGAG |
| | | CCTCAGGTGTACACCCTGCCCCCTAGCAGAGATGAGCT |
| | | GACCAAGAACCAGGTGTCCCTGACCTGTCTCGTGAAAG |
| | | GCTTCTACCCCTCCGATATCGCCGTGGAATGGGAGAGC |
| | | AACGGCCAGCCCGAGAACAACTACAAGACCACCCCCC |
| | | CTGTGCTGGACTCCGACGGCTCATTCTTCCTGTACTCTA |
| | | AGCTGACAGTGGACAAGTCCCGGTGGCAGCAGGGCAA |
| | | CGTGTTCTCCTGCTCCGTGATGCACGAGGCCCTGCACA |
| | | ACCACTACACCCAGAAGTCCCTGTCCCTGTCTCCCGGG |
| | | GGAGGCGGAGGATCTGGCGGAGGCGGATCCGGTGGTG |
| | | GCGGATCTGGGGGCGGTGGATCTGAGGTGCAGCTGCTG |
| | | GAATCTGGGGGAGGACTGGTGCAGCCAGGCGGATCTC |
| | | TGAGGCTGTCCTGCGCTGCTTCCGGCTTTACCTTCTCCA |
| | | GCCACGCCATGAGTTGGGTGCGCCAGGCACCCGGAAA |
| | | AGGACTGGAATGGGTGTCAGCCATCTGGGCCTCCGGCG |
| | | AGCAGTACTACGCCGATAGCGTGAAGGGCCGGTTCACC |
| | | ATCTCTCGGGATAACAGCAAGAATACTCTGTACCTGCA |
| | | GATGAACTCCCTGCGCGCTGAAGATACCGCTGTGTATT |
| | | ACTGCGCCAAGGGCTGGCTGGGCAACTTCGATTACTGG |
| | | GGCCAGGGAACCCTCGTGACTGTCTCGAGCGCTTCTGT |
| | | GGCCGCTCCCTCCGTGTTCATCTTCCCACCTTCCGACGA |
| | | GCAGCTGAAGTCCGGCACTGCCTCTGTCGTGTGCCTGC |
| | | TGAACAACTTCTACCCTCGGGAAGCCAAGGTGCAGTGG |
| | | AAAGTGGATAACGCCCTGCAGTCCGGCAACTCCCAGG |
| | | AATCCGTGACCGAGCAGGACTCCAAGGACAGCACCTA |
| | | CTCCCTGAGCAGCACCCTGACCCTGTCCAAGGCCGACT |
| | | ACGAGAAGCACAAGGTGTACGCCTGTGAAGTGACCCA |
| | | CCAGGGCCTGTCCAGCCCCGTGACCAAGTCCTTCAAC |
| | | CGGGGCGAGTGC |
| 408 | (28H1) VLCH1- | see above |
| | light chain 2 | |
| | (nucleotide | |
| | sequence) | |
| 397 | (6C8) VLCL-light | see Table 78 |
| | chain | |
| 412 | heavy chain | QVTLRESGPALVKPTQTLTLTCTFSGFSLSTSGMGVGWIR |
| | (6C8) | QPPGKALEWLAHIWWDDDKYYQPSLKSRLTISKDTSKNQ |
| | VHCH1_VHCH1 | VVLTMTNMDPVDTATYYCARTRRYFPFAYWGQGTLVTV |
| | Fc VHCL (28H1) | SSASTKGPSVFPLAPSSKSTSGGTAALGCLVKDYFPEPVTV |
| | | SWNSGALTSGVHTFPAVLQSSGLYSLSSVVTVPSSSLGTQ |
| | | TYICNVNHKPSNTKVDKKVEPKSCDGGGGSGGGGSQVTL |
| | | RESGPALVKPTQTLTLTCTFSGFSLSTSGMGVGWIRQPPG |
| | | KALEWLAHIWWDDDKYYQPSLKSRLTISKDTSKNQVVLT |
| | | MTNMDPVDTATYYCARTRRYFPFAYWGQGTLVTVSSAS |
| | | TKGPSVFPLAPSSKSTSGGTAALGCLVKDYFPEPVTVSWN |
| | | SGALTSGVHTFPAVLQSSGLYSLSSVVTVPSSSLGTQTYIC |
| | | NVNHKPSNTKVDKKVEPKSCDKTHTCPPCPAPEAAGGPS |
| | | VFLFPPKPKDTLMISRTPEVTCVVVDVSHEDPEVKFNWY |
| | | VDGVEVHNAKTKPREEQYNSTYRVVSVLTVLHQDWLNG |
| | | KEYKCKVSNKALGAPIEKTISKAKGQPREPQVYTLPPSRD |
| | | ELTKNQVSLTCLVKGFYPSDIAVEWESNGQPENNYKTTPP |
| | | VLDSDGSFFLYSKLTVDKSRWQQGNVFSCSVMHEALHN |
| | | HYTQKSLSLSPGGGGGSGGGGSGGGGSGGGGSEVQLLES |
| | | GGGLVQPGGSLRLSCAASGFTFSSHAMSWVRQAPGKGLE |
| | | WVSAIWASGEQYYADSVKGRFTISRDNSKNTLYLQMNSL |
| | | RAEDTAVYYCAKGWLGNFDYWGQGTLVTVSSASVAAPS |
| | | VFIFPPSDEQLKSGTASVVCLLNNFYPREAKVQWKVDNA |
| | | LQSGNSQESVTEQDSKDSTYSLSSTLTLSKADYEKHKVYA |
| | | CEVTHQGLSSPVTKSFNRGEC |
| 410 | (28H1) VLCH1- | see above |
| | light chain 2 | |

[0972] All genes were transiently expressed under control of a chimeric MPSV promoter consisting of the MPSV core promoter combined with the CMV promoter enhancer fragment. The expression vector also contains the oriP region for episomal replication in EBNA (Epstein Barr Virus Nuclear Antigen) containing host cells. The bispecific anti-GITR/anti-FAP constructs were produced by co-transfecting HEK293-EBNA cells with the mammalian expression vectors using polyethylenimine. The cells were transfected with the corresponding expression vectors in a 1:1:1 ratio (“vector heavy chain 1”:“vector heavy chain 2”:“vector light chain” or “vector heavy chain”:“vector light chain1”:“vector light chain2”).

[0973] Production and purification was done according to a protocol as used in section 4.5 for the production of Ox40 bispecific molecules.

TABLE 85
Production Summary of bispecific GITR-FAP antibodies with
tetravalent GITR binding

| | | Concen- | Monomer | | |
|---|---|---|---|---|---|
| | Yield | tration | (non-red) | HMW | LMW |
| Format | [mg/L] | [mg/L] | [%] | [%] | [%] |
| (GITR-FAP) [8A06] | 1.73 | 3.40 | 98.25 | 1.47 | 0.28 |
| 4 + 1 construct | | | | | |
| (GITR-FAP) [8A06] | 2.39 | 1.28 | 98.68 | 0.50 | 0.82 |
| 4 + 2 construct | | | | | |
| (GITR-FAP) [6C8] | 8.21 | 5.94 | 97.85 | 1.53 | 0.61 |
| 4 + 1 construct | | | | | |
| (GITR-FAP) [6C8] | 6.68 | 9.55 | 97.98 | 2.02 | — |
| 4 + 2 construct | | | | | |

### 12.2 Simultaneous Binding of Bispecific GITR/FAP Constructs

[0974] The capacity of binding simultaneously human GITR Fc(kih) and human FAP was assessed by surface plasmon resonance (SPR). All SPR experiments were performed on a Biacore T200 at 25° C. with HBS-EP as running buffer (0.01 M HEPES pH 7.4, 0.15 M NaCl, 3 mM EDTA, 0.005% Surfactant P20, Biacore, Freiburg/Germany). Biotinylated human GITR Fc (kih) was directly coupled to a flow cell of a streptavidin (SA) sensor chip Immobilization levels up to 1000 resonance units (RU) were used. The bispecific constructs targeting GITR and FAP were passed at a concentration range of 200 nM with a flow of 30 μL/minute through the flow cells over 90 seconds and dissociation was set to zero sec. Human FAP was injected as second analyte with a flow of 30 μL/minute through the flow cells over 90 seconds at a concentration of 500 nM. The dissociation was monitored for 120 sec. Bulk refractive index differences were corrected for by subtracting the response obtained in a reference flow cell, where no protein was immobilized.

[0975] All bispecific constructs could bind simultaneously human GITR and human FAP (FIGS. 54B and 54C).

### 12.3 Binding to GITR-Expressing HEK Cells and FAP-Expressing 3T3 Cells

[0976] The binding to cell surface GITR was tested in a similar manner as described in Example 9.6.2. for 4-1BB by using Human Embryonic Kidney 293 (HEK) cells that were engineered to overexpress human GITR protein on the cell surface (HEK-GITR). HEK-GITR cells or parental GITR negative HEK cells (HEK WT) as control were grown in DMEM medium (Gibco Cat. No. 42430-025) supplemented with 10% FBS (Gibco Cat. No. 16140-071), 50 U/mL penicillin-streptomycin (Gibco Cat. No. 15070-063) and GlutaMAX (Gibco Cat. No. 35050-061) with 1 μg/mL puromycin (Gibco Cat. No. A11138-03) for HEK-GITR cells only. The binding to cell surface FAP was tested using 3T3 cells (ATCC CRL-1658) that were transfected to express human fibroblast activating protein (huFAP) (see Example 9.6.3.2). Parental 3T3 cells were grown in DMEM medium supplemented with 10% CS (Sigma Cat. No. C8056). 3T3-huFAP cells were grown in DMEM+10% CS with 1.5 μg/mL puromycin.

[0977] Cells were harvested, washed with PBS (Gibco Cat. No. 20012-019) and adjusted to a cell density of 1×10⁷ cells/mL in PBS. Control cells (HEK WT and 3T3 WT) were labeled with 2.5 μM of cell proliferation dye eFluor 670 (eBioscience Cat. No. 65-0840-85) in PBS for 7 minutes at 37° C. Cells were washed twice with complete media and once with PBS+2% FBS before adjusting cell density to 1×10⁷ cells/mL in PBS+2% FBS. 2×10⁵ cells (10⁵ HEK WT+10⁵ HEK GITR or 10⁵ 3 T3 WT+10⁵ 3 T3-huFAP) were seeded per well of round-bottom 96-well plates (TPP, Cat. No. 92097).

[0978] Plates were centrifuged at 4° C., 3 minutes at 600×g and supernatant was flicked off. Cells were resuspended in 50 μL/well of 4° C. cold PBS+2% FBS containing titrated anti-GITR antibody constructs for 120 minutes at 4° C. Plates were washed twice with 200 μL/well 4° C. PBS+2% FBS to remove unbound construct. Cells were stained with Zombie Aqua Fixable Viability Kit (Biolegend Cat. No. 423102) and secondary antibody (Jackson ImmunoResearch Cat. No. 109-116-098) in PBS for 30 minutes at 4° C. Plates were centrifuged at 4° C. for 3 minutes at 600×g and washed twice with PBS+2% FBS. Cells were fixed with PBS+2% formaldehyde (Polysciences Cat. No. 04018) for 20 minutes at room temperature. Plates were centrifuged at 4° C., 3 minutes at 600×g and supernatant was flicked off. Cells were washed with 200 μL/well FACS buffer (eBioscience Cat. No. 00-4222-26) and finally resuspended in 100 μL/well FACS buffer for acquisition the next day using a 4-laser LSR II (BD Bioscience with DIVA software).

[0979] As shown in FIG. 55A, all tested bispecific anti-GITR constructs bound efficiently to human GITR expressing target cells, but not, or at negligible rates, to GITR negative control cells (FIG. 55B). Therefore, anti-GITR antibodies maintain their GITR specificity also when expressed as a bispecific, FAP targeted format.

TABLE 86
EC₅₀ values for binding of anti-GITR FAP targeted mono or
bivalent constructs to cell surface expressed human GITR.

| | GITR⁺ cell |
|---|---|
| Construct | EC₅₀ [nM] |
| (GITR-FAP) [8A06] | 3.848 |
| 4 + 2 construct | |
| (GITR-FAP) [8A06] | 1.122 |
| 4 + 1 construct | |
| (GITR-DP47) [8A06] | 1.899 |
| 4 + 1 construct | |
| (GITR-DP47) [8A06] | 1.92 |
| 4 + 2 construct with charged residues | |
| (GITR-FAP) [8A06] | 2.057 |
| 4 + 2 construct with charged residues | |

[0980] As shown in FIG. 56A, all tested bispecific anti-GITR constructs bound efficiently to human FAP-expressing target cells, but not, or at negligible rates, to parental 3T3 cells (negative control, FIG. 56B). Therefore, the bispecific anti-GITR/anti-GITR antibodies maintain their FAP specificity in the bispecific format.

### Example 13

### Functional Properties of Bispecific Anti-Human GITR Binding Molecules

### 13.1 GITR Mediated Costimulation of Human CD4 and CD8 T Cells in the Presence of Suboptimal TCR Stimulation

[0981] Ligation of GITR provides a synergistic co-stimulatory signal promoting division and survival of T-cells following suboptimal T-cell receptor (TCR) stimulation (Clouthier et al., Cytokine Growth Factor Rev. 2014 April; 25(2):91-106).

[0982] To analyze the agonistic properties of bispecific anti-human GITR binding molecules, a selected binder (clone 8A06) in a FAP targeted monovalent format or its corresponding non-targeted version as control were tested for their ability to co-activate T cells upon surface immobilization. For this, resting ef450-labeled human PBMC were stimulated six days with a suboptimal concentration of anti-CD3 antibody in the presence of irradiated FAP⁺ NIH/3T3-huFAP clone 19 cells and titrated anti-GITR constructs. Effects on T-cell proliferation were analyzed through monitoring of total cell counts and ef450 dilution in living cells by flow cytometry.

[0983] Buffy coats were obtained from the Zurich blood donation center. To isolate fresh peripheral blood mononuclear cells (PBMCs) the buffy coat was diluted with the same volume of PBS (Gibco by Life Technologies, Cat. No. 20012-019). 50 mL polypropylene centrifuge tubes (TPP, Cat.-No. 91050) were supplied with 15 mL Lymphoprep (Stemcell, Cat No 07851) and the buffy coat solution was layered above the Lymphoprep. The tubes were centrifuged for 30 min at 400×g, room temperature and with no acceleration and no break. Afterwards the PBMCs were collected from the interface, washed three times with PBS and resuspended in T cell medium consisting of RPMI 1640 medium presuplemented with Glutamax (Gibco by Life Technology, Cat. No. 72400-021) supplied with 10% Fetal Bovine Serum (FBS, Gibco by Life Technology, Cat. No. 16140-071), 1% (v/v), 1 mM Sodium-Pyruvate (SIGMA, Cat. No. S8636), 1% (v/v) MEM non-essential amino acids (SIGMA, Cat.-No. M7145) and 50 μM β-Mercaptoethanol (SIGMA, M3148). PBMCs were used directly after isolation.

[0984] PBMCs were labeled with ef450 at a cell density of 1×10⁶ cells/mL with ef450 (eBioscience, Cat No: 65-0842-85) at a final concentration of 2.5 μM diluted in PBS for 8 minutes at 37° C. Thereafter, cells were washed twice with T cell medium. Labeled cells were rested in T-cell media at 37° C. for 30 minutes.

[0985] Mouse embryonic fibroblast NIH/3T3-huFAP clone 19 cells (Example 4.3.2.2) were harvested using cell dissociation buffer (Invitrogen, Cat.-No. 13151-014) for 10 minutes at 37° C. Cells were washed once with PBS. Cells were resuspended at 10⁷/ml in PBS and irradiated in an xRay irradiator by a dose ao 5000 RAD to prevent later overgrowth of human PBMC by the tumor cell line. NIH/3T3-huFAP clone 39 cells were seeded at a density of 0.25*10⁵cells per well in T cell media in a sterile 96-well flat bottom adhesion tissue culture plate (TPP, Cat. No. 92096) over night at 37° C. and 5% CO₂ in an incubator (Hera Cell 150).

[0986] Sixteen hours later, human, ef450 labelled PBMCs were added to each well at a density of 0.75*10⁵ cells per well. Anti-human CD3 antibody (eBioscience, Clone OKT3, Ref: 16-0037-85) at a final concentration of 0.12 ng/ml and FAP targeted mono- and bivalent anti-GITR antigen binding molecules were added at the indicated concentrations. Cells were cultured for six days at 37° C. and 5% CO₂ in an incubator (Hera Cell 150). Then, cells were surface-stained with fluorescent dye-conjugated antibodies anti-human CD4 (Clone L200, BD Pharmingen, Cat no: 550631), CD8 (clone RPa-T8, BioLegend, Cat.-No. 301044), CD25 (BC96, BioLegend, Cat.-No. 302632) and Zombie Aqua (Biolegend, Cat no: 423102) for live/dead discrimination, diluted in PBS and incubated for 30 min at 4° C. Cells were resuspended in 140 μL/well FACS buffer plus 10 μL/well of absolute count beads (CountBright, Molecular Probes, C36950), and acquired using a 5-laser Fortessa flow cytometer (BD Bioscience with DIVA software).

[0987] Zombie Aqua negative living cells were analyzed for decrease in median of fluorescence of ef450 as a marker for proliferation.

[0988] As shown in FIGS. 57A and 57B, costimulation with non-targeted anti-GITR (GITR 8A06 DP47GS 4+1 sf w(1a)) (triangle) did not have an effect on the proliferative capacity of suboptimally TCR stimulated CD4 CD8 T cells. Hyper-crosslinking of the FAP targeted anti-GITR construct (GITR 8A06 28H1 4+1 sf W(1)) (circle) by the present NIH/3T3-huFAP cells is needed for T cell costimulation and clearly promoted proliferation.

1. A bispecific antigen binding molecule, comprising
(a) four moities capable of specific binding to a costimulatory TNF receptor family member,
(b) at least one moiety capable of specific binding to a target cell antigen, and
(c) a Fc domain composed of a first and a second subunit capable of stable association.

2. The bispecific antigen binding molecule of claim 1, wherein each two of the four moieties capable of specific binding to a costimulatory TNF receptor family member are fused to each other, optionally via a peptide linker.

3. The bispecific antigen binding molecule of claim 1, wherein the costimulatory TNF receptor family member is selected from the group consisting of OX40, 4-1BB and GITR.

4. The bispecific antigen binding molecule of claim 1, wherein the costimulatory TNF receptor family member is OX40.

5. The bispecific antigen binding molecule of claim 4, wherein the moiety capable of specific binding to a costimulatory TNF receptor family member binds to a polypeptide comprising the amino acid sequence of SEQ ID NO:1.

6. The bispecific antigen binding molecule of claim 4, comprising four moities capable of specific binding to OX40, wherein each of said moities comprises a VH domain comprising
(i) a CDR-H1 comprising the amino acid sequence selected from the group consisting of SEQ ID NO:2 and SEQ ID NO:3,
(ii) a CDR-H2 comprising the amino acid sequence selected from the group consisting of SEQ ID NO:4 and SEQ ID NO:5, and
(iii) a CDR-H3 comprising the amino acid sequence selected from the group consisting of SEQ ID NO:6, SEQ ID NO:7, SEQ ID NO:8, SEQ ID NO: 9, SEQ ID NO:10, SEQ ID NO:11 and SEQ ID NO:12,
and a VL domain comprising
(iv) a CDR-L1 comprising the amino acid sequence selected from the group consisting of SEQ ID NO:13, SEQ ID NO:14 and SEQ ID NO:15,
(v) a CDR-L2 comprising the amino acid sequence selected from the group consisting of SEQ ID NO:16, SEQ ID NO:17 and SEQ ID NO:18, and
(vi) a CDR-L3 comprising the amino acid sequence selected from the group consisting of SEQ ID NO:19, SEQ ID NO:20, SEQ ID NO:21, SEQ ID NO:22, SEQ ID NO:23 and SEQ ID NO:24.

7. The bispecific antigen binding molecule of claim 4, wherein each of the moieties capable of specific binding to OX40 comprises a heavy chain variable region VH comprising an amino acid sequence that is at least about 95%, 96%, 97%, 98%, 99% or 100% identical to an amino acid sequence selected from the group consisting of SEQ ID NO:25, SEQ ID NO: 27, SEQ ID NO:29, SEQ ID NO:31, SEQ ID NO:33, SEQ ID NO:35 and SEQ ID NO:37 and a light chain variable region VL comprising an amino acid sequence that is at least about 95%, 96%, 97%, 98%, 99% or 100% identical to an amino acid sequence selected from the group consisting of SEQ ID NO:26, SEQ ID NO: 28, SEQ ID NO:30, SEQ ID NO:30, SEQ ID NO:32, SEQ ID NO:34, SEQ ID NO:36 and SEQ ID NO:38.

8. The bispecific antigen binding molecule of claim 4, wherein each of the moieties capable of specific binding to OX40 comprises
(i) a heavy chain variable region VH comprising an amino acid sequence of SEQ ID NO:25 and a light chain variable region VL comprising an amino acid sequence of SEQ ID NO:26,
(ii) a heavy chain variable region VH comprising an amino acid sequence of SEQ ID NO:27 and a light chain variable region VL comprising an amino acid sequence of SEQ ID NO:28,
(iii) a heavy chain variable region VH comprising an amino acid sequence of SEQ ID NO:29 and a light chain variable region VL comprising an amino acid sequence of SEQ ID NO:30,
(iv) a heavy chain variable region VH comprising an amino acid sequence of SEQ ID NO:31 and a light chain variable region VL comprising an amino acid sequence of SEQ ID NO:32,
(v) a heavy chain variable region VH comprising an amino acid sequence of SEQ ID NO:33 and a light chain variable region VL comprising an amino acid sequence of SEQ ID NO:34,
(vi) a heavy chain variable region VH comprising an amino acid sequence of SEQ ID NO:35 and a light chain variable region VL comprising an amino acid sequence of SEQ ID NO:36, or
(vii) a heavy chain variable region VH comprising an amino acid sequence of SEQ ID NO:37 and a light chain variable region VL comprising an amino acid sequence of SEQ ID NO:38.

9. The bispecific antigen binding molecule of claim 4, wherein the target cell antigen is selected from the group consisting of Fibroblast Activation Protein (FAP), Melanoma-associated Chondroitin Sulfate Proteoglycan (MCSP), Epidermal Growth Factor Receptor (EGFR), Carcinoembryonic Antigen (CEA), CD19, CD20 and CD33.

10. The bispecific antigen binding molecule of claim 10, wherein the target cell antigen is Fibroblast Activation Protein (FAP).

11. The bispecific antigen binding molecule of claim 10, wherein the moiety capable of specific binding to FAP comprises a VH domain comprising
(i) a CDR-H1 comprising the amino acid sequence selected from the group consisting of SEQ ID NO:39 and SEQ ID NO:40,
(ii) a CDR-H2 comprising the amino acid sequence selected from the group consisting of SEQ ID NO:41 and SEQ ID NO:42, and
(iii) a CDR-H3 comprising the amino acid sequence selected from the group consisting of SEQ ID NO:43 and SEQ ID NO:44,
and a VL domain comprising
(iv) a CDR-L1 comprising the amino acid sequence selected from the group consisting of SEQ ID NO:45 and SEQ ID NO:46,
(v) a CDR-L2 comprising the amino acid sequence selected from the group consisting of SEQ ID NO:47 and SEQ ID NO:48, and
(vi) a CDR-L3 comprising the amino acid sequence selected from the group consisting of SEQ ID NO:49 and SEQ ID NO:50.

12. The bispecific antigen binding molecule of claim 4, wherein
(i) each of the moieties capable of specific binding to OX40 comprises a heavy chain variable region VH comprising an amino acid sequence that is at least about 95%, 96%, 97%, 98%, 99% or 100% identical to an amino acid sequence selected from the group consisting of SEQ ID NO:25, SEQ ID NO: 27, SEQ ID NO:29, SEQ ID NO:31, SEQ ID NO:33, SEQ ID NO:35 or SEQ ID NO:37 and a light chain variable region comprising an amino acid sequence that is at least about 95%, 96%, 97%, 98%, 99% or 100% identical to an amino acid sequence selected from the group consisting of SEQ ID NO:26, SEQ ID NO: 28, SEQ ID NO:30, SEQ ID NO:32, SEQ ID NO:34, SEQ ID NO:36 or SEQ ID NO:38 and
(ii) the moiety capable of specific binding to FAP comprises a heavy chain variable region VH comprising an amino acid sequence that is at least about 95%, 96%, 97%, 98%, 99% or 100% identical to the amino acid sequence of SEQ ID NO:51 or SEQ ID NO:53 and a light chain variable region comprising an amino acid sequence that is at least about 95%, 96%, 97%, 98%, 99% or 100% identical to the amino acid sequence of SEQ ID NO:52 or SEQ ID NO:54.

13. The bispecific antigen binding molecule of claim 1, wherein the costimulatory TNF receptor family member is 4-1BB.

14. The bispecific antigen binding molecule of claim 1, wherein the moiety capable of specific binding to a costimulatory TNF receptor family member binds to a polypeptide comprising the amino acid sequence of SEQ ID NO:239.

15. The bispecific antigen binding molecule of 13, comprising four moities capable of specific binding to 4-1BB, wherein each of said moities comprises a VH domain comprising
(i) a CDR-H1 comprising the amino acid sequence selected from the group consisting of SEQ ID NO:249 and SEQ ID NO:250,
(ii) a CDR-H2 comprising the amino acid sequence selected from the group consisting of SEQ ID NO:251 and SEQ ID NO:252, and
(iii) a CDR-H3 comprising the amino acid sequence selected from the group consisting of SEQ ID NO:253, SEQ ID NO:254, SEQ ID NO:255, SEQ ID NO: 256, and SEQ ID NO:257,
and a VL domain comprising
(iv) a CDR-L1 comprising the amino acid sequence selected from the group consisting of SEQ ID NO:258 and SEQ ID NO:259,
(v) a CDR-L2 comprising the amino acid sequence selected from the group consisting of SEQ ID NO:260 and SEQ ID NO:261, and
(vi) a CDR-L3 comprising the amino acid sequence selected from the group consisting of SEQ ID NO:262, SEQ ID NO:263, SEQ ID NO:264, SEQ ID NO:265, and SEQ ID NO:266.

16. The bispecific antigen binding molecule of 13, wherein each of the moieties capable of specific binding to 4-1BB comprises a heavy chain variable region VH comprising an amino acid sequence that is at least about 95%, 96%, 97%, 98%, 99% or 100% identical to an amino acid sequence selected from the group consisting of SEQ ID NO:267, SEQ ID NO: 269, SEQ ID NO:271, SEQ ID NO:273, and SEQ ID NO:275, and a light chain variable region VL comprising an amino acid sequence that is at least about 95%, 96%, 97%, 98%, 99% or 100% identical to an amino acid sequence selected from the group consisting of SEQ ID NO:268, SEQ ID NO: 270, SEQ ID NO:272, SEQ ID NO:274, and SEQ ID NO:276.

17. The bispecific antigen binding molecule 13, wherein each of the moities capable of specific binding to 4-1BB comprises
(i) a heavy chain variable region VH comprising an amino acid sequence of SEQ ID NO:267 and a light chain variable region VL comprising an amino acid sequence of SEQ ID NO:268,
(ii) a heavy chain variable region VH comprising an amino acid sequence of SEQ ID NO:269 and a light chain variable region VL comprising an amino acid sequence of SEQ ID NO:270,
(iii) a heavy chain variable region VH comprising an amino acid sequence of SEQ ID NO:271 and a light chain variable region VL comprising an amino acid sequence of SEQ ID NO:272,
(iv) a heavy chain variable region VH comprising an amino acid sequence of SEQ ID NO:273 and a light chain variable region VL comprising an amino acid sequence of SEQ ID NO:274, or
(v) a heavy chain variable region VH comprising an amino acid sequence of SEQ ID NO:275 and a light chain variable region VL comprising an amino acid sequence of SEQ ID NO:276.

18. The bispecific antigen binding molecule of claim 13, wherein
(i) each of the moieties capable of specific binding to 4-1BB comprises a heavy chain variable region VH comprising an amino acid sequence that is at least about 95%, 96%, 97%, 98%, 99% or 100% identical to the amino acid sequence selected from the group consisting of SEQ ID NO:267, SEQ ID NO: 269, SEQ ID NO:271, SEQ ID NO:273, and SEQ ID NO:275 and a light chain variable region comprising an amino acid sequence that is at least about 95%, 96%, 97%, 98%, 99% or 100% identical to an amino acid sequence selected from the group consisting of SEQ ID NO:268, SEQ ID NO: 270, SEQ ID NO:272, SEQ ID NO:274, and SEQ ID NO:276, and
(ii) the moiety capable of specific binding to FAP comprises a heavy chain variable region VH comprising an amino acid sequence that is at least about 95%, 96%, 97%, 98%, 99% or 100% identical to the amino acid sequence of SEQ ID NO:51 or SEQ ID NO:53 and a light chain variable region comprising an amino acid sequence that is at least about 95%, 96%, 97%, 98%, 99% or 100% identical to the amino acid sequence of SEQ ID NO:52 or SEQ ID NO:54.

19. The bispecific antigen binding molecule claim 1, wherein the costimulatory TNF receptor family member is GITR.

20. The bispecific antigen binding molecule of claim 19, wherein the moiety capable of specific binding to a costimulatory TNF receptor family member binds to a polypeptide comprising the amino acid sequence of SEQ ID NO:357.

21. The bispecific antigen binding molecule of claim 19, comprising four moities capable of specific binding to GITR, wherein each of said moities comprises a VH domain comprising a CDR-H1 comprising the amino acid sequence of SEQ ID NO:371, a CDR-H2 comprising the amino acid sequence of SEQ ID NO:372 and a CDR-H3 comprising the amino acid sequence of SEQ ID NO:373, and a VL domain comprising a CDR-L1 comprising the amino acid sequence of SEQ ID NO:374, a CDR-L2 comprising the amino acid sequence of SEQ ID NO:375 and a CDR-L3 comprising the amino acid sequence of SEQ ID NO:376.

22. The bispecific antigen binding molecule of claim 19, wherein each of the moieties capable of specific binding to GITR comprises a heavy chain variable region VH comprising an amino acid sequence that is at least about 95%, 96%, 97%, 98%, 99% or 100% identical to an amino acid sequence of SEQ ID NO:383, and a light chain variable region VL comprising an amino acid sequence that is at least about 95%, 96%, 97%, 98%, 99% or 100% identical to an amino acid sequence of SEQ ID NO:384.

23. The bispecific antigen binding molecule of claim 19, wherein each of the moities capable of specific binding to GITR comprises a heavy chain variable region VH comprising an amino acid sequence of SEQ ID NO:383 and a light chain variable region VL comprising an amino acid sequence of SEQ ID NO:384.

24. The bispecific antigen binding molecule of claim 19, wherein
(i) each of the moieties capable of specific binding to GITR comprises a heavy chain variable region VH comprising an amino acid sequence that is at least about 95%, 96%, 97%, 98%, 99% or 100% identical to the amino acid sequence of SEQ ID NO:383, and a light chain variable region comprising an amino acid sequence that is at least about 95%, 96%, 97%, 98%, 99% or 100% identical to an amino acid sequence of SEQ ID NO:384, and
(ii) the moiety capable of specific binding to FAP comprises a heavy chain variable region VH comprising an amino acid sequence that is at least about 95%, 96%, 97%, 98%, 99% or 100% identical to the amino acid sequence of SEQ ID NO:51 or SEQ ID NO:53 and a light chain variable region comprising an amino acid sequence that is at least about 95%, 96%, 97%, 98%, 99% or 100% identical to the amino acid sequence of SEQ ID NO:52 or SEQ ID NO:54.

25. The bispecific antigen binding molecule of claim 1, wherein the four moieties capable of specific binding to a costimulatory TNF receptor family member are Fab fragments and each two thereof are fused to each other, optionally via a peptide linker.

26. The bispecific antigen binding molecule of claim 1, wherein a first Fab fragment capable of specific binding to a costimulatory TNF receptor family member is fused at the C-terminus of the CH1 domain to the VH domain of a second Fab fragment capable of specific binding to a costimulatory TNF receptor family member and a third Fab fragment capable of specific binding to a costimulatory TNF receptor family member is fused at the C-terminus of the CH1 domain to the VH domain of a fourth Fab fragment capable of specific binding to a costimulatory TNF receptor family member, optionally via a peptide linker.

27. The bispecific antigen binding molecule of claim 1, wherein in the Fab fragments capable of specific binding to a costimulatory TNF receptor family member in the constant domain CL the amino acid at position 124 is substituted independently by lysine (K), arginine (R) or histidine (H) (numbering according to Kabat EU Index), and in the constant domain CH1 the amino acids at positions 147 and 213 are substituted independently by glutamic acid (E) or aspartic acid (D) (numbering according to Kabat EU index).

28. The bispecific antigen binding molecule of claim 1, wherein the bispecific antigen binding molecule is tetravalent for the costimulatory TNF receptor family member and monovalent for the target cell antigen.

29. The bispecific antigen binding molecule of claim 1, wherein the moiety capable of specific binding to a target cell antigen comprises a VH and VL domain and wherein the VH domain is connected via a peptide linker to the C-terminus of the first subunit of the Fc domain and the VL domain is connected via a peptide linker to the C-terminus of the second subunit of the Fc domain.

30. The bispecific antigen binding molecule of claim 1, wherein the bispecific antigen binding molecule is tetravalent for the costimulatory TNF receptor family member and bivalent for the target cell antigen.

31. The bispecific antigen binding molecule of claim 1, wherein the two moieties capable of specific binding to a target cell antigen are Fab fragments or crossover Fab fragments.

32. The bispecific antigen binding molecule of claim 1, wherein each of the Fab fragments or crossover Fab fragments capable of specific binding to a target cell antigen is fused at the N-terminus of the VH or VL domain via a peptide linker to the C-terminus of one of the subunits of the Fc domain.

33. The bispecific antigen binding molecule of claim 1, wherein the two moieties capable of specific binding to a target cell antigen are VH-VL crossover Fab fragments and are each fused at the N-terminus of the VL domain via a peptide linker to the C-terminus of one of the subunits of the Fc domain.

34. The bispecific antigen binding molecule of claim 1, wherein the Fc domain is of human IgG1 subclass with the amino acid mutations L234A, L235A and P329G (numbering according to Kabat EU index).

35. A polynucleotide encoding the bispecific antigen binding molecule of claim 1.

36. A pharmaceutical composition comprising a bispecific antigen binding molecule of claim 1, and at least one pharmaceutically acceptable excipient.

37. (canceled)

38. (canceled)

39. (canceled)

40. (canceled)

41. A method of inhibiting the growth of tumor cells in an individual comprising administering to the individual an effective amount of the bispecific antigen binding molecule of claim 1, to inhibit the growth of the tumor cells.

The application's sequence listing, which the Patent Office published only in electronic form, follows.

SEQUENCE LISTING (412 sequences)

SEQ ID NO: 1 - protein, 186 aa, Homo sapiens [sequence omitted]

SEQ ID NO: 2 - protein, 5 aa, Artificial sequence
  anti-OX40 CDR-H1
SYAIS

SEQ ID NO: 3 - protein, 5 aa, Artificial sequence
  anti-OX40 CDR-H1
SYAMS

SEQ ID NO: 4 - protein, 17 aa, Artificial sequence
  anti-OX40 CDR-H2
GIIPIFGTANYAQKFQG

SEQ ID NO: 5 - protein, 17 aa, Artificial sequence
  anti-OX40 CDR-H2
AISGSGGSTYYADSVKG

SEQ ID NO: 6 - protein, 7 aa, Artificial sequence
  anti-OX40 CDR-H3
EYGWMDY

SEQ ID NO: 7 - protein, 9 aa, Artificial sequence
  anti-OX40 CDR-H3
EYYRGPYDY

SEQ ID NO: 8 - protein, 7 aa, Artificial sequence
  anti-OX40 CDR-H3
EYGSMDY

SEQ ID NO: 9 - protein, 13 aa, Artificial sequence
  anti-OX40 CDR-H3
VNYPYSYWGDFDY

SEQ ID NO: 10 - protein, 7 aa, Artificial sequence
  anti-OX40 CDR-H3
DVGAFDY

SEQ ID NO: 11 - protein, 7 aa, Artificial sequence
  anti-OX40 CDR-H3
DVGPFDY

SEQ ID NO: 12 - protein, 11 aa, Artificial sequence
  anti-OX40 CDR-H3
VFYRGGVSMDY

SEQ ID NO: 13 - protein, 11 aa, Artificial sequence
  anti-OX40 CDR-L1
RASQSISSWLA

SEQ ID NO: 14 - protein, 12 aa, Artificial sequence
  anti-OX40 CDR-L1
RASQSVSSSYLA

SEQ ID NO: 15 - protein, 11 aa, Artificial sequence
  anti-OX40 CDR-L1
QGDSLRSYYAS

SEQ ID NO: 16 - protein, 7 aa, Artificial sequence
  anti-OX40 CDR-L2
DASSLES

SEQ ID NO: 17 - protein, 7 aa, Artificial sequence
  anti-OX40 CDR-L2
GASSRAT

SEQ ID NO: 18 - protein, 7 aa, Artificial sequence
  anti-OX40 CDR-L2
GKNNRPS

SEQ ID NO: 19 - protein, 10 aa, Artificial sequence
  anti-OX40 CDR-L3
QQYLTYSRFT

SEQ ID NO: 20 - protein, 9 aa, Artificial sequence
  anti-OX40 CDR-L3
QQYSSQPYT

SEQ ID NO: 21 - protein, 10 aa, Artificial sequence
  anti-OX40 CDR-L3
QQYISYSMLT

SEQ ID NO: 22 - protein, 9 aa, Artificial sequence
  anti-OX40 CDR-L3
QQYQAFSLT

SEQ ID NO: 23 - protein, 9 aa, Artificial sequence
  anti-OX40 CDR-L3
QQYGSSPLT

SEQ ID NO: 24 - protein, 10 aa, Artificial sequence
  anti-OX40 CDR-L3
NSRVMPHNRV

SEQ ID NO: 25 - protein, 116 aa, Artificial sequence
  8H9 VH
QVQLVQSGAEVKKPGSSVKVSCKASGGTFSSYAISWVRQAPGQGLEWMGGIIPIFGTANYAQKFQGRVTITADKSTSTAYMELSSLRSEDTAVYYCAREYGWMDYWGQGTTVTVSS

SEQ ID NO: 26 - protein, 108 aa, Artificial sequence
  8H9 VL
DIQMTQSPSTLSASVGDRVTITCRASQSISSWLAWYQQKPGKAPKLLIYDASSLESGVPSRFSGSGSGTEFTLTISSLQPDDFATYYCQQYLTYSRFTFGQGTKVEIK

SEQ ID NO: 27 - protein, 118 aa, Artificial sequence
  49B4 VH
QVQLVQSGAEVKKPGSSVKVSCKASGGTFSSYAISWVRQAPGQGLEWMGGIIPIFGTANYAQKFQGRVTITADKSTSTAYMELSSLRSEDTAVYYCAREYYRGPYDYWGQGTTVTVSS

SEQ ID NO: 28 - protein, 107 aa, Artificial sequence
  49B4 VL
DIQMTQSPSTLSASVGDRVTITCRASQSISSWLAWYQQKPGKAPKLLIYDASSLESGVPSRFSGSGSGTEFTLTISSLQPDDFATYYCQQYSSQPYTFGQGTKVEIK

SEQ ID NO: 29 - protein, 116 aa, Artificial sequence
  1G4 VH
QVQLVQSGAEVKKPGSSVKVSCKASGGTFSSYAISWVRQAPGQGLEWMGGIIPIFGTANYAQKFQGRVTITADKSTSTAYMELSSLRSEDTAVYYCAREYGSMDYWGQGTTVTVSS

SEQ ID NO: 30 - protein, 108 aa, Artificial sequence
  1G4 VL
DIQMTQSPSTLSASVGDRVTITCRASQSISSWLAWYQQKPGKAPKLLIYDASSLESGVPSRFSGSGSGTEFTLTISSLQPDDFATYYCQQYISYSMLTFGQGTKVEIK

SEQ ID NO: 31 - protein, 122 aa, Artificial sequence
  20B7 VH
QVQLVQSGAEVKKPGSSVKVSCKASGGTFSSYAISWVRQAPGQGLEWMGGIIPIFGTANYAQKFQGRVTITADKSTSTAYMELSSLRSEDTAVYYCARVNYPYSYWGDFDYWGQGTTVTVSS

SEQ ID NO: 32 - protein, 107 aa, Artificial sequence
  20B7 VL
DIQMTQSPSTLSASVGDRVTITCRASQSISSWLAWYQQKPGKAPKLLIYDASSLESGVPSRFSGSGSGTEFTLTISSLQPDDFATYYCQQYQAFSLTFGQGTKVEIK

SEQ ID NO: 33 - protein, 116 aa, Artificial sequence
  CLC-563 VH
EVQLLESGGGLVQPGGSLRLSCAASGFTFSSYAMSWVRQAPGKGLEWVSAISGSGGSTYYADSVKGRFTISRDNSKNTLYLQMNSLRAEDTAVYYCALDVGAFDYWGQGALVTVSS

SEQ ID NO: 34 - protein, 108 aa, Artificial sequence
  CLC-563 VL
EIVLTQSPGTLSLSPGERATLSCRASQSVSSSYLAWYQQKPGQAPRLLIYGASSRATGIPDRFSGSGSGTDFTLTISRLEPEDFAVYYCQQYGSSPLTFGQGTKVEIK

SEQ ID NO: 35 - protein, 116 aa, Artificial sequence
  CLC-564  VH
EVQLLESGGGLVQPGGSLRLSCAASGFTFSSYAMSWVRQAPGKGLEWVSAISGSGGSTYYADSVKGRFTISRDNSKNTLYLQMNSLRAEDTAVYYCAFDVGPFDYWGQGTLVTVSS

SEQ ID NO: 36 - protein, 108 aa, Artificial sequence; identical to SEQ ID NO: 34
  CLC-564 VL

SEQ ID NO: 37 - protein, 120 aa, Artificial sequence
  17A9 VH
EVQLLESGGGLVQPGGSLRLSCAASGFTFSSYAMSWVRQAPGKGLEWVSAISGSGGSTYYADSVKGRFTISRDNSKNTLYLQMNSLRAEDTAVYYCARVFYRGGVSMDYWGQGTLVTVSS

SEQ ID NO: 38 - protein, 106 aa, Artificial sequence
  17A9 VL
SSELTQDPAVSVALGQTVRITCQGDSLRSYYASWYQQKPGQAPVLVIYGKNNRPSGIPDRFSGSSSGNTASLTITGAQAEDEADYYCNSRVMPHNRVFGGGTKLTV

SEQ ID NO: 39 - protein, 5 aa, Artificial sequence
  FAP CDR-H1
SHAMS

SEQ ID NO: 40 - protein, 5 aa, Artificial sequence
  FAP-CDR-H1
SYAMS

SEQ ID NO: 41 - protein, 16 aa, Artificial sequence
  FAP-CDR-H2
AIWASGEQYYADSVKG

SEQ ID NO: 42 - protein, 17 aa, Artificial sequence
  FAP CDR-H2
AIIGSGASTYYADSVKG

SEQ ID NO: 43 - protein, 8 aa, Artificial sequence
  FAP CDR-H3
GWLGNFDY

SEQ ID NO: 44 - protein, 8 aa, Artificial sequence
  FAP-CDR-H3
GWFGGFNY

SEQ ID NO: 45 - protein, 12 aa, Artificial sequence
  FAP CDR-L1
RASQSVSRSYLA

SEQ ID NO: 46 - protein, 12 aa, Artificial sequence
  anti-FAP CDR-L1
RASQSVTSSYLA

SEQ ID NO: 47 - protein, 7 aa, Artificial sequence
  anti-FAP CDR-L2
GASTRAT

SEQ ID NO: 48 - protein, 7 aa, Artificial sequence
  anti-FAP CDR-L2
VGSRRAT

SEQ ID NO: 49 - protein, 9 aa, Artificial sequence
  anti-FAP CDR-L3
QQGQVIPPT

SEQ ID NO: 50 - protein, 9 aa, Artificial sequence
  anti-FAP CDR-L3
QQGIMLPPT

SEQ ID NO: 51 - protein, 116 aa, Artificial sequence
  28H1 VH
EVQLLESGGGLVQPGGSLRLSCAASGFTFSSHAMSWVRQAPGKGLEWVSAIWASGEQYYADSVKGRFTISRDNSKNTLYLQMNSLRAEDTAVYYCAKGWLGNFDYWGQGTLVTVSS

SEQ ID NO: 52 - protein, 108 aa, Artificial sequence
  28H1 VL
EIVLTQSPGTLSLSPGERATLSCRASQSVSRSYLAWYQQKPGQAPRLLIIGASTRATGIPDRFSGSGSGTDFTLTISRLEPEDFAVYYCQQGQVIPPTFGQGTKVEIK

SEQ ID NO: 53 - protein, 117 aa, Artificial sequence
  4B9 VH
EVQLLESGGGLVQPGGSLRLSCAASGFTFSSYAMSWVRQAPGKGLEWVSAIIGSGASTYYADSVKGRFTISRDNSKNTLYLQMNSLRAEDTAVYYCAKGWFGGFNYWGQGTLVTVSS

SEQ ID NO: 54 - protein, 108 aa, Artificial sequence
  4B9 VL
EIVLTQSPGTLSLSPGERATLSCRASQSVTSSYLAWYQQKPGQAPRLLINVGSRRATGIPDRFSGSGSGTDFTLTISRLEPEDFAVYYCQQGIMLPPTFGQGTKVEIK

SEQ ID NO: 55 - protein, 760 aa, Homo sapiens
MKTWVKIVFGVATSAVLALLVMCIVLRPSRVHNSEENTMRALTLKDILNGTFSYKTFFPNWISGQEYLHQSADNNIVLYNIETGQSYTILSNRTMKSVNASNYGLSPDRQFVYLESDYSKLWRYSYTATYYIYDLSNGEFVRGNELPRPIQYLCWSPVGSKLAYVYQNNIYLKQRPGDPPFQITFNGRENKIFNGIPDWVYEEEMLATKYALWWSPNGKFLAYAEFNDTDIPVIAYSYYGDEQYPRTINIPYPKAGAKNPVVRIFIIDTTYPAYVGPQEVPVPAMIASSDYYFSWLTWVTDERVCLQWLKRVQNVSVLSICDFREDWQTWDCPKTQEHIEESRTGWAGGFFVSTPVFSYDAISYYKIFSDKDGYKHIHYIKDTVENAIQITSGKWEAINIFRVTQDSLFYSSNEFEEYPGRRNIYRISIGSYPPSKKCVTCHLRKERCQYYTASFSDYAKYYALVCYGPGIPISTLHDGRTDQEIKILEENKELENALKNIQLPKEEIKKLEVDEITLWYKMILPPQFDRSKKYPLLIQVYGGPCSQSVRSVFAVNWISYLASKEGMVIALVDGRGTAFQGDKLLYAVYRKLGVYEVEDQITAVRKFIEMGFIDEKRIAIWGWSYGGYVSSLALASGTGLFKCGIAVAPVSSWEYYASVYTERFMGLPTKDDNLEHYKNSTVMARAEYFRNVDYLLIHGTADDNVHFQNSAQIAKALVNAQVDFQAMWYSDQNHGLSGLSTNHLYTHMTHFLKQCFSLSD

SEQ ID NO: 56 - protein, 748 aa, Artificial sequence
  tagged human FAP ECD
RPSRVHNSEENTMRALTLKDILNGTFSYKTFFPNWISGQEYLHQSADNNIVLYNIETGQSYTILSNRTMKSVNASNYGLSPDRQFVYLESDYSKLWRYSYTATYYIYDLSNGEFVRGNELPRPIQYLCWSPVGSKLAYVYQNNIYLKQRPGDPPFQITFNGRENKIFNGIPDWVYEEEMLATKYALWWSPNGKFLAYAEFNDTDIPVIAYSYYGDEQYPRTINIPYPKAGAKNPVVRIFIIDTTYPAYVGPQEVPVPAMIASSDYYFSWLTWVTDERVCLQWLKRVQNVSVLSICDFREDWQTWDCPKTQEHIEESRTGWAGGFFVSTPVFSYDAISYYKIFSDKDGYKHIHYIKDTVENAIQITSGKWEAINIFRVTQDSLFYSSNEFEEYPGRRNIYRISIGSYPPSKKCVTCHLRKERCQYYTASFSDYAKYYALVCYGPGIPISTLHDGRTDQEIKILEENKELENALKNIQLPKEEIKKLEVDEITLWYKMILPPQFDRSKKYPLLIQVYGGPCSQSVRSVFAVNWISYLASKEGMVIALVDGRGTAFQGDKLLYAVYRKLGVYEVEDQITAVRKFIEMGFIDEKRIAIWGWSYGGYVSSLALASGTGLFKCGIAVAPVSSWEYYASVYTERFMGLPTKDDNLEHYKNSTVMARAEYFRNVDYLLIHGTADDNVHFQNSAQIAKALVNAQVDFQAMWYSDQNHGLSGLSTNHLYTHMTHFLKQCFSLSDGKKKKKKGHHHHHH

SEQ ID NO: 57 - DNA, 2244 bp, Artificial sequence
  tagged human FAP ECD
cgcccttcaagagttcataactctgaagaaaatacaatgagagcactcacactgaaggatattttaaatggaacattttcttataaaacattttttccaaactggatttcaggacaagaatatcttcatcaatctgcagataacaatatagtactttataatattgaaacaggacaatcatataccattttgagtaatagaaccatgaaaagtgtgaatgcttcaaattacggcttatcacctgatcggcaatttgtatatctagaaagtgattattcaaagctttggagatactcttacacagcaacatattacatctatgaccttagcaatggagaatttgtaagaggaaatgagcttcctcgtccaattcagtatttatgctggtcgcctgttgggagtaaattagcatatgtctatcaaaacaatatctatttgaaacaaagaccaggagatccaccttttcaaataacatttaatggaagagaaaataaaatatttaatggaatcccagactgggtttatgaagaggaaatgcttgctacaaaatatgctctctggtggtctcctaatggaaaatttttggcatatgcggaatttaatgatacggatataccagttattgcctattcctattatggcgatgaacaatatcctagaacaataaatattccatacccaaaggctggagctaagaatcccgttgttcggatatttattatcgataccacttaccctgcgtatgtaggtccccaggaagtgcctgttccagcaatgatagcctcaagtgattattatttcagttggctcacgtgggttactgatgaacgagtatgtttgcagtggctaaaaagagtccagaatgtttcggtcctgtctatatgtgacttcagggaagactggcagacatgggattgtccaaagacccaggagcatatagaagaaagcagaactggatgggctggtggattctttgtttcaacaccagttttcagctatgatgccatttcgtactacaaaatatttagtgacaaggatggctacaaacatattcactatatcaaagacactgtggaaaatgctattcaaattacaagtggcaagtgggaggccataaatatattcagagtaacacaggattcactgttttattctagcaatgaatttgaagaataccctggaagaagaaacatctacagaattagcattggaagctatcctccaagcaagaagtgtgttacttgccatctaaggaaagaaaggtgccaatattacacagcaagtttcagcgactacgccaagtactatgcacttgtctgctacggcccaggcatccccatttccacccttcatgatggacgcactgatcaagaaattaaaatcctggaagaaaacaaggaattggaaaatgctttgaaaaatatccagctgcctaaagaggaaattaagaaacttgaagtagatgaaattactttatggtacaagatgattcttcctcctcaatttgacagatcaaagaagtatcccttgctaattcaagtgtatggtggtccctgcagtcagagtgtaaggtctgtatttgctgttaattggatatcttatcttgcaagtaaggaagggatggtcattgccttggtggatggtcgaggaacagctttccaaggtgacaaactcctctatgcagtgtatcgaaagctgggtgtttatgaagttgaagaccagattacagctgtcagaaaattcatagaaatgggtttcattgatgaaaaaagaatagccatatggggctggtcctatggaggatacgtttcatcactggcccttgcatctggaactggtcttttcaaatgtggtatagcagtggctccagtctccagctgggaatattacgcgtctgtctacacagagagattcatgggtctcccaacaaaggatgataatcttgagcactataagaattcaactgtgatggcaagagcagaatatttcagaaatgtagactatcttctcatccacggaacagcagatgataatgtgcactttcaaaactcagcacagattgctaaagctctggttaatgcacaagtggatttccaggcaatgtggtactctgaccagaaccacggcttatccggcctgtccacgaaccacttatacacccacatgacccacttcctaaagcagtgtttctctttgtcagacggcaaaaagaaaaagaaaaagggccaccaccatcaccatcac

SEQ ID NO: 58 - protein, 761 aa, Mus musculus
MKTWLKTVFGVTTLAALALVVICIVLRPSRVYKPEGNTKRALTLKDILNGTFSYKTYFPNWISEQEYLHQSEDDNIVFYNIETRESYIILSNSTMKSVNATDYGLSPDRQFVYLESDYSKLWRYSYTATYYIYDLQNGEFVRGYELPRPIQYLCWSPVGSKLAYVYQNNIYLKQRPGDPPFQITYTGRENRIFNGIPDWVYEEEMLATKYALWWSPDGKFLAYVEFNDSDIPIIAYSYYGDGQYPRTINIPYPKAGAKNPVVRVFIVDTTYPHHVGPMEVPVPEMIASSDYYFSWLTWVSSERVCLQWLKRVQNVSVLSICDFREDWHAWECPKNQEHVEESRTGWAGGFFVSTPAFSQDATSYYKIFSDKDGYKHIHYIKDTVENAIQITSGKWEAIYIFRVTQDSLFYSSNEFEGYPGRRNIYRISIGNSPPSKKCVTCHLRKERCQYYTASFSYKAKYYALVCYGPGLPISTLHDGRTDQEIQVLEENKELENSLRNIQLPKVEIKKLKDGGLTFWYKMILPPQFDRSKKYPLLIQVYGGPCSQSVKSVFAVNWITYLASKEGIVIALVDGRGTAFQGDKFLHAVYRKLGVYEVEDQLTAVRKFIEMGFIDEERIAIWGWSYGGYVSSLALASGTGLFKCGIAVAPVSSWEYYASIYSERFMGLPTKDDNLEHYKNSTVMARAEYFRNVDYLLIHGTADDNVHFQNSAQIAKALVNAQVDFQAMWYSDQNHGISSGRSQNHLYTHMTHFLKQCFSLSD

SEQ ID NO: 59 - protein, 749 aa, Artificial sequence
  tagged murine FAP ECD
RPSRVYKPEGNTKRALTLKDILNGTFSYKTYFPNWISEQEYLHQSEDDNIVFYNIETRESYIILSNSTMKSVNATDYGLSPDRQFVYLESDYSKLWRYSYTATYYIYDLQNGEFVRGYELPRPIQYLCWSPVGSKLAYVYQNNIYLKQRPGDPPFQITYTGRENRIFNGIPDWVYEEEMLATKYALWWSPDGKFLAYVEFNDSDIPIIAYSYYGDGQYPRTINIPYPKAGAKNPVVRVFIVDTTYPHHVGPMEVPVPEMIASSDYYFSWLTWVSSERVCLQWLKRVQNVSVLSICDFREDWHAWECPKNQEHVEESRTGWAGGFFVSTPAFSQDATSYYKIFSDKDGYKHIHYIKDTVENAIQITSGKWEAIYIFRVTQDSLFYSSNEFEGYPGRRNIYRISIGNSPPSKKCVTCHLRKERCQYYTASFSYKAKYYALVCYGPGLPISTLHDGRTDQEIQVLEENKELENSLRNIQLPKVEIKKLKDGGLTFWYKMILPPQFDRSKKYPLLIQVYGGPCSQSVKSVFAVNWITYLASKEGIVIALVDGRGTAFQGDKFLHAVYRKLGVYEVEDQLTAVRKFIEMGFIDEERIAIWGWSYGGYVSSLALASGTGLFKCGIAVAPVSSWEYYASIYSERFMGLPTKDDNLEHYKNSTVMARAEYFRNVDYLLIHGTADDNVHFQNSAQIAKALVNAQVDFQAMWYSDQNHGILSGRSQNHLYTHMTHFLKQCFSLSDGKKKKKKGHHHHHH

SEQ ID NO: 60 - DNA, 2247 bp, Artificial sequence
  tagged murine FAP ECD
cgtccctcaagagtttacaaacctgaaggaaacacaaagagagctcttaccttgaaggatattttaaatggaacattctcatataaaacatattttcccaactggatttcagaacaagaatatcttcatcaatctgaggatgataacatagtattttataatattgaaacaagagaatcatatatcattttgagtaatagcaccatgaaaagtgtgaatgctacagattatggtttgtcacctgatcggcaatttgtgtatctagaaagtgattattcaaagctctggcgatattcatacacagcgacatactacatctacgaccttcagaatggggaatttgtaagaggatacgagctccctcgtccaattcagtatctatgctggtcgcctgttgggagtaaattagcatatgtatatcaaaacaatatttatttgaaacaaagaccaggagatccaccttttcaaataacttatactggaagagaaaatagaatatttaatggaataccagactgggtttatgaagaggaaatgcttgccacaaaatatgctctttggtggtctccagatggaaaatttttggcatatgtagaatttaatgattcagatataccaattattgcctattcttattatggtgatggacagtatcctagaactataaatattccatatccaaaggctggggctaagaatccggttgttcgtgtttttattgttgacaccacctaccctcaccacgtgggcccaatggaagtgccagttccagaaatgatagcctcaagtgactattatttcagctggctcacatgggtgtccagtgaacgagtatgcttgcagtggctaaaaagagtgcagaatgtctcagtcctgtctatatgtgatttcagggaagactggcatgcatgggaatgtccaaagaaccaggagcatgtagaagaaagcagaacaggatgggctggtggattctttgtttcgacaccagcttttagccaggatgccacttcttactacaaaatatttagcgacaaggatggttacaaacatattcactacatcaaagacactgtggaaaatgctattcaaattacaagtggcaagtgggaggccatatatatattccgcgtaacacaggattcactgttttattctagcaatgaatttgaaggttaccctggaagaagaaacatctacagaattagcattggaaactctcctccgagcaagaagtgtgttacttgccatctaaggaaagaaaggtgccaatattacacagcaagtttcagctacaaagccaagtactatgcactcgtctgctatggccctggcctccccatttccaccctccatgatggccgcacagaccaagaaatacaagtattagaagaaaacaaagaactggaaaattctctgagaaatatccagctgcctaaagtggagattaagaagctcaaagacgggggactgactttctggtacaagatgattctgcctcctcagtttgacagatcaaagaagtaccctttgctaattcaagtgtatggtggtccttgtagccagagtgttaagtctgtgtttgctgttaattggataacttatctcgcaagtaaggaggggatagtcattgccctggtagatggtcggggcactgctttccaaggtgacaaattcctgcatgccgtgtatcgaaaactgggtgtatatgaagttgaggaccagctcacagctgtcagaaaattcatagaaatgggtttcattgatgaagaaagaatagccatatggggctggtcctacggaggttatgtttcatccctggcccttgcatctggaactggtcttttcaaatgtggcatagcagtggctccagtctccagctgggaatattacgcatctatctactcagagagattcatgggcctcccaacaaaggacgacaatctcgaacactataaaaattcaactgtgatggcaagagcagaatatttcagaaatgtagactatcttctcatccacggaacagcagatgataatgtgcactttcagaactcagcacagattgctaaagctttggttaatgcacaagtggatttccaggcgatgtggtactctgaccagaaccatggtatattatctgggcgctcccagaatcatttatatacccacatgacgcacttcctcaagcaatgcttttctttatcagacggcaaaaagaaaaagaaaaagggccaccaccatcaccatcac

SEQ ID NO: 61 - protein, 748 aa, Artificial sequence
  tagged cynomolgus FAP ECD
RPPRVHNSEENTMRALTLKDILNGTFSYKTFFPNWISGQEYLHQSADNNIVLYNIETGQSYTILSNRTMKSVNASNYGLSPDRQFVYLESDYSKLWRYSYTATYYIYDLSNGEFVRGNELPRPIQYLCWSPVGSKLAYVYQNNIYLKQRPGDPPFQITFNGRENKIFNGIPDWVYEEEMLATKYALWWSPNGKFLAYAEFNDTDIPVIAYSYYGDEQYPRTINIPYPKAGAKNPFVRIFIIDTTYPAYVGPQEVPVPAMIASSDYYFSWLTWVTDERVCLQWLKRVQNVSVLSICDFREDWQTWDCPKTQEHIEESRTGWAGGFFVSTPVFSYDAISYYKIFSDKDGYKHIHYIKDTVENAIQITSGKWEAINIFRVTQDSLFYSSNEFEDYPGRRNIYRISIGSYPPSKKCVTCHLRKERCQYYTASFSDYAKYYALVCYGPGIPISTLHDGRTDQEIKILEENKELENALKNIQLPKEEIKKLEVDEITLWYKMILPPQFDRSKKYPLLIQVYGGPCSQSVRSVFAVNWISYLASKEGMVIALVDGRGTAFQGDKLLYAVYRKLGVYEVEDQITAVRKFIEMGFIDEKRIAIWGWSYGGYVSSLALASGTGLFKCGIAVAPVSSWEYYASVYTERFMGLPTKDDNLEHYKNSTVMARAEYFRNVDYLLIHGTADDNVHFQNSAQIAKALVNAQVDFQAMWYSDQNHGLSGLSTNHLYTHMTHFLKQCFSLSDGKKKKKKGHHHHHH

SEQ ID NO: 62 - DNA, 2244 bp, Artificial sequence
  tagged cynomolgus FAP domain
cgccctccaagagttcataactctgaagaaaatacaatgagagcactcacactgaaggatattttaaatgggacattttcttataaaacattttttccaaactggatttcaggacaagaatatcttcatcaatctgcagataacaatatagtactttataatattgaaacaggacaatcatataccattttgagtaacagaaccatgaaaagtgtgaatgcttcaaattatggcttatcacctgatcggcaatttgtatatctagaaagtgattattcaaagctttggagatactcttacacagcaacatattacatctatgaccttagcaatggagaatttgtaagaggaaatgagcttcctcgtccaattcagtatttatgctggtcgcctgttgggagtaaattagcatatgtctatcaaaacaatatctatttgaaacaaagaccaggagatccaccttttcaaataacatttaatggaagagaaaataaaatatttaatggaatcccagactgggtttatgaagaggaaatgcttgctacaaaatatgctctctggtggtctcctaatggaaaatttttggcatatgcggaatttaatgatacagatataccagttattgcctattcctattatggcgatgaacaatatcccagaacaataaatattccatacccaaaggccggagctaagaatccttttgttcggatatttattatcgataccacttaccctgcgtatgtaggtccccaggaagtgcctgttccagcaatgatagcctcaagtgattattatttcagttggctcacgtgggttactgatgaacgagtatgtttgcagtggctaaaaagagtccagaatgtttcggtcttgtctatatgtgatttcagggaagactggcagacatgggattgtccaaagacccaggagcatatagaagaaagcagaactggatgggctggtggattctttgtttcaacaccagttttcagctatgatgccatttcatactacaaaatatttagtgacaaggatggctacaaacatattcactatatcaaagacactgtggaaaatgctattcaaattacaagtggcaagtgggaggccataaatatattcagagtaacacaggattcactgttttattctagcaatgaatttgaagattaccctggaagaagaaacatctacagaattagcattggaagctatcctccaagcaagaagtgtgttacttgccatctaaggaaagaaaggtgccaatattacacagcaagtttcagcgactacgccaagtactatgcacttgtctgctatggcccaggcatccccatttccacccttcatgacggacgcactgatcaagaaattaaaatcctggaagaaaacaaggaattggaaaatgctttgaaaaatatccagctgcctaaagaggaaattaagaaacttgaagtagatgaaattactttatggtacaagatgattcttcctcctcaatttgacagatcaaagaagtatcccttgctaattcaagtgtatggtggtccctgcagtcagagtgtaaggtctgtatttgctgttaattggatatcttatcttgcaagtaaggaagggatggtcattgccttggtggatggtcggggaacagctttccaaggtgacaaactcctgtatgcagtgtatcgaaagctgggtgtttatgaagttgaagaccagattacagctgtcagaaaattcatagaaatgggtttcattgatgaaaaaagaatagccatatggggctggtcctatggaggatatgtttcatcactggcccttgcatctggaactggtcttttcaaatgtgggatagcagtggctccagtctccagctgggaatattacgcgtctgtctacacagagagattcatgggtctcccaacaaaggatgataatcttgagcactataagaattcaactgtgatggcaagagcagaatatttcagaaatgtagactatcttctcatccacggaacagcagatgataatgtgcactttcaaaactcagcacagattgctaaagctctggttaatgcacaagtggatttccaggcaatgtggtactctgaccagaaccacggcttatccggcctgtccacgaaccacttatacacccacatgacccacttcctaaagcagtgtttctctttgtcagacggcaaaaagaaaaagaaaaagggccaccaccatcaccatcac

SEQ ID NO: 63 - protein, 702 aa, Homo sapiens
MESPSAPPHRWCIPWQRLLLTASLLTFWNPPTTAKLTIESTPFNVAEGKEVLLLVHNLPQHLFGYSWYKGERVDGNRQIIGYVIGTQQATPGPAYSGREIIYPNASLLIQNIIQNDTGFYTLHVIKSDLVNEEATGQFRVYPELPKPSISSNNSKPVEDKDAVAFTCEPETQDATYLWWVNNQSLPVSPRLQLSNGNRTLTLFNVTRNDTASYKCETQNPVSARRSDSVILNVLYGPDAPTISPLNTSYRSGENLNLSCHAASNPPAQYSWFVNGTFQQSTQELFIPNITVNNSGSYTCQAHNSDTGLNRTTVTTITVYAEPPKPFITSNNSNPVEDEDAVALTCEPEIQNTTYLWWVNNQSLPVSPRLQLSNDNRTLTLLSVTRNDVGPYECGIQNKLSVDHSDPVILNVLYGPDDPTISPSYTYYRPGVNLSLSCHAASNPPAQYSWLIDGNIQQHTQELFISNITEKNSGLYTCQANNSASGHSRTTVKTITVSAELPKPSISSNNSKPVEDKDAVAFTCEPEAQNTTYLWWVNGQSLPVSPRLQLSNGNRTLTLFNVTRNDARAYVCGIQNSVSANRSDPVTLDVLYGPDTPIISPPDSSYLSGANLNLSCHSASNPSPQYSWRINGIPQQHTQVLFIAKITPNNNGTYACFVSNLATGRNNSIVKSITVSASGTSPGLSAGATVGIMIGVLVGVALI

SEQ ID NO: 64 - protein, 2322 aa, Homo sapiens
MQSGPRPPLPAPGLALALTLTMLARLASAASFFGENHLEVPVATALTDIDLQLQFSTSQPEALLLLAAGPADHLLLQLYSGRLQVRLVLGQEELRLQTPAETLLSDSIPHTVVLTVVEGWATLSVDGFLNASSAVPGAPLEVPYGLFVGGTGTLGLPYLRGTSRPLRGCLHAATLNGRSLLRPLTPDVHEGCAEEFSASDDVALGFSGPHSLAAFPAWGTQDEGTLEFTLTTQSRQAPLAFQAGGRRGDFIYVDIFEGHLRAVVEKGQGTVLLHNSVPVADGQPHEVSVHINAHRLEISVDQYPTHTSNRGVLSYLEPRGSLLLGGLDAEASRHLQEHRLGLTPEATNASLLGCMEDLSVNGQRRGLREALLTRNMAAGCRLEEEEYEDDAYGHYEAFSTLAPEAWPAMELPEPCVPEPGLPPVFANFTQLLTISPLVVAEGGTAWLEWRHVQPTLDLMEAELRKSQVLFSVTRGARHGELELDIPGAQARKMFTLLDVVNRKARFIHDGSEDTSDQLVLEVSVTARVPMPSCLRRGQTYLLPIQVNPVNDPPHIIFPHGSLMVILEHTQKPLGPEVFQAYDPDSACEGLTFQVLGTSSGLPVERRDQPGEPATEFSCRELEAGSLVYVHRGGPAQDLTFRVSDGLQASPPATLKVVAIRPAIQIHRSTGLRLAQGSAMPILPANLSVETNAVGQDVSVLFRVTGALQFGELQKQGAGGVEGAEWWATQAFHQRDVEQGRVRYLSTDPQHHAYDTVENLALEVQVGQEILSNLSFPVTIQRATVWMLRLEPLHTQNTQQETLTTAHLEATLEEAGPSPPTFHYEVVQAPRKGNLQLQGTRLSDGQGFTQDDIQAGRVTYGATARASEAVEDTFRFRVTAPPYFSPLYTFPIHIGGDPDAPVLTNVLLVVPEGGEGVLSADHLFVKSLNSASYLYEVMERPRHGRLAWRGTQDKTTMVTSFTNEDLLRGRLVYQHDDSETTEDDIPFVATRQGESSGDMAWEEVRGVFRVAIQPVNDHAPVQTISRIFHVARGGRRLLTTDDVAFSDADSGFADAQLVLTRKDLLFGSIVAVDEPTRPIYRFTQEDLRKRRVLFVHSGADRGWIQLQVSDGQHQATALLEVQASEPYLRVANGSSLVVPQGGQGTIDTAVLHLDTNLDIRSGDEVHYHVTAGPRWGQLVRAGQPATAFSQQDLLDGAVLYSHNGSLSPRDTMAFSVEAGPVHTDATLQVTIALEGPLAPLKLVRHKKIYVFQGEAAEIRRDQLEAAQEAVPPADIVFSVKSPPSAGYLVMVSRGALADEPPSLDPVQSFSQEAVDTGRVLYLHSRPEAWSDAFSLDVASGLGAPLEGVLVELEVLPAAIPLEAQNFSVPEGGSLTLAPPLLRVSGPYFPTLLGLSLQVLEPPQHGALQKEDGPQARTLSAFSWRMVEEQLIRYVHDGSETLTDSFVLMANASEMDRQSHPVAFTVTVLPVNDQPPILTTNTGLQMWEGATAPIPAEALRSTDGDSGSEDLVYTIEQPSNGRVVLRGAPGTEVRSFTQAQLDGGLVLFSHRGTLDGGFRFRLSDGEHTSPGHFFRVTAQKQVLLSLKGSQTLTVCPGSVQPLSSQTLRASSSAGTDPQLLLYRVVRGPQLGRLFHAQQDSTGEALVNFTQAEVYAGNILYEHEMPPEPFWEAHDTLELQLSSPPARDVAATLAVAVSFEAACPQRPSHLWKNKGLWVPEGQRARITVAALDASNLLASVPSPQRSEHDVLFQVTQFPSRGQLLVSEEPLHAGQPHFLQSQLAAGQLVYAHGGGGTQQDGFHFRAHLQGPAGASVAGPQTSEAFAITVRDVNERPPQPQASVPLRLTRGSRAPISRAQLSVVDPDSAPGEIEYEVQRAPHNGFLSLVGGGLGPVTRFTQADVDSGRLAFVANGSSVAGIFQLSMSDGASPPLPMSLAVDILPSAIEVQLRAPLEVPQALGRSSLSQQQLRVVSDREEPEAAYRLIQGPQYGHLLVGGRPTSAFSQFQIDQGEVVFAFTNFSSSHDHFRVLALARGVNASAVVNVTVRALLHVWAGGPWPQGATLRLDPTVLDAGELANRTGSVPRFRLLEGPRHGRVVRVPRARTEPGGSQLVEQFTQQDLEDGRLGLEVGRPEGRAPGPAGDSLTLELWAQGVPPAVASLDFATEPYNAARPYSVALLSVPEAARTEAGKPESSTPTGEPGPMASSPEPAVAKGGFLSFLEANMFSVIIPMCLVLLLLALILPLLFYLRKRNKTGKHDVQVLTAKPRNGLAGDTETFRKVEPGQAIPLTAVPGQGPPPGGQPDPELLQFCRTPNPALKNGQYWV

SEQ ID NO: 65 - protein, 1210 aa, Homo sapiens [sequence omitted]

SEQ ID NO: 66 - protein, 556 aa, Homo sapiens [sequence omitted]

SEQ ID NO: 67 - protein, 297 aa, Homo sapiens
MTTPRNSVNGTFPAEPMKGPIAMQSGPKPLFRRMSSLVGPTQSFFMRESKTLGAVQIMNGLFHIALGGLLMIPAGIYAPICVTVWYPLWGGIMYIISGSLLAATEKNSRKCLVKGKMIMNSLSLFAAISGMILSIMDILNIKISHFLKMESLNFIRAHTPYINIYNCEPANPSEKNSPSTQYCYSIQSLFLGILSVMLIFAFFQELVIAGIVENEWKRTCSRPKSNIVLLSAEEKKEQTIEIKEEVVGLTETSSQPKNEEDIEIIPIQEEEEEETETNFPEPPQDQESSPIENDSSP

SEQ ID NO: 68 - protein, 364 aa, Homo sapiens
MPLLLLLPLLWAGALAMDPNFWLQVQESVTVQEGLCVLVPCTFFHPIPYYDKNSPVHGYWFREGAIISRDSPVATNKLDQEVQEETQGRFRLLGDPSRNNCSLSIVDARRRDNGSYFFRMERGSTKYSYKSPQLSVHVTDLTHRPKILIPGTLEPGHSKNLTCSVSWACEQGTPPIFSWLSAAPTSLGPRTTHSSVLIITPRPQDHGTNLTCQVKFAGAGVTTERTIQLNVTYVPQNPTTGIFPGDGSGKQETRAGVVHGAIGGAGVTALLALCLCLIFFIVKTHRRKAARTAVGRNDTHPTTGSASPKHQKKSKLHGPTETSSCSGAAPTVEMDEELHYASLNFHGMNPSKDTSTEYSEVRTQ

SEQ ID NO: 69 - protein, 277 aa, Homo sapiens
MCVGARRLGRGPCAALLLLGLGLSTVTGLHCVGDTYPSNDRCCHECRPGNGMVSRCSRSQNTVCRPCGPGFYNDVVSSKPCKPCTWCNLRSGSERKQLCTATQDTVCRCRAGTQPLDSYKPGVDCAPCPPGHFSPGDNQACKPWTNCTLAGKHTLQPASNSSDAICEDRDPPATQPQETQGPPARPITVQPTEAWPRTSQGPSTRPVEVPGGRAVAAILGLGLVLGLLGPLAILLALYLLRRDQRLPPDAHKPPGGGSFRTPIQEEQADAHSTLAKI

SEQ ID NO: 70 - protein, 255 aa, Homo sapiens
MGNSCYNIVATLLLVLNFERTRSLQDPCSNCPAGTFCDNNRNQICSPCPPNSFSSAGGQRTCDICRQCKGVFRTRKECSSTSNAECDCTPGFHCLGAGCSMCEQDCKQGQELTKKGCKDCCFGTFNDQKRGICRPWTNCSLDGKSVLVNGTKERDVVCGPSPADLSPGASSVTPPAPAREPGHSPQIISFFLALTSTALLFLLFFLTLRFSVVKRGRKKLLYIFKQPFMRPVQTTQEEDGCSCRFPEEEEGGCEL

SEQ ID NO: 71 - protein, 260 aa, Homo sapiens
MARPHPWWLCVLGTLVGLSATPAPKSCPERHYWAQGKLCCQMCEPGTFLVKDCDQHRKAAQCDPCIPGVSFSPDHHTRPHCESCRHCNSGLLVRNCTITANAECACRNGWQCRDKECTECDPLPNPSLTARSSQALSPHPQPTHLPYVSEMLEARTAGHMQTLADFRQLPARTLSTHWPPQRSLCSSDFIRILVIFSGMFLVFTLAGALFLHQRRKYRSNKGESPVEPAEPCHYSCPREEEGSTIPIQEDYRKPEPACSP

SEQ ID NO: 72 - protein, 283 aa, Homo sapiens
MEPPGDWGPPPWRSTPKTDVLRLVLYLTFLGAPCYAPALPSCKEDEYPVGSECCPKCSPGYRVKEACGELTGTVCEPCPPGTYIAHLNGLSKCLQCQMCDPAMGLRASRNCSRTENAVCGCSPGHFCIVQDGDHCAACRAYATSSPGQRVQKGGTESQDTLCQNCPPGTFSPNGTLEECQHQTKCSWLVTKAGAGTSSSHWVWWFLSGSLVIVIVCSTVGLIICVKRRKPRGDVVKVIVSVQRKRQEAEGEATVIEALQAPPDVTTVAVEETIPSFTGRSPNH

SEQ ID NO: 73 - protein, 595 aa, Homo sapiens
MRVLLAALGLLFLGALRAFPQDRPFEDTCHGNPSHYYDKAVRRCCYRCPMGLFPTQQCPQRPTDCRKQCEPDYYLDEADRCTACVTCSRDDLVEKTPCAWNSSRVCECRPGMFCSTSAVNSCARCFFHSVCPAGMIVKFPGTAQKNTVCEPASPGVSPACASPENCKEPSSGTIPQAKPTPVSPATSSASTMPVRGGTRLAQEAASKLTRAPDSPSSVGRPSSDPGLSPTQPCPEGSGDCRKQCEPDYYLDEAGRCTACVSCSRDDLVEKTPCAWNSSRTCECRPGMICATSATNSCARCVPYPICAAETVTKPQDMAEKDTTFEAPPLGTQPDCNPTPENGEAPASTSPTQSLLVDSQASKTLPIPTSAPVALSSTGKPVLDAGPVLFWVILVLVVVVGSSAFLLCHRRACRKRIRQKLHLCYPVQTSQPKLELVDSRPRRSSTQLRSGASVTEPVAEERGLMSQPLMETCHSVGAAYLESLPLQDASPAGGPSSPRDLPEPRVSTEHTNNKIEKIYIMKADTVIVGTVKAELPEGRGLAGPAEPELEEELEADHTPHYPEQETEPPLGSCSDVMLSVEEEGKEDPLPTAASGK

SEQ ID NO: 74 - protein, 241 aa, Homo sapiens
MAQHGAMGAFRALCGLALLCALSLGQRPTGGPGCGPGRLLLGTGTDARCCRVHTTRCCRDYPGEECCSEWDCMCVQPEFHCGDPCCTTCRHHPCPPGQGVQSQGKFSFGFQCIDCASGTFSGGHEGHCKPWTDCTQFGFLTVFPGNKTHNAVCVPGSPPAEPLGWLTVVLLAVAACVLLLTSAQLGLHIWQLRSQCMWPRETQLLLEVPPSTEDARSCQFPEEERGERSAEEKGRLGDLWV

SEQ ID NO: 75 - protein, 272 aa, Mus musculus
MYVWVQQPTALLLLALTLGVTARRLNCVKHTYPSGHKCCRECQPGHGMVSRCDHTRDTLCHPCETGFYNEAVNYDTCKQCTQCNHRSGSELKQNCTPTQDTVCRCRPGTQPRQDSGYKLGVDCVPCPPGHFSPGNNQACKPWTNCTLSGKQTRHPASDSLDAVCEDRSLLATLLWETQRPTFRPTTVQSTTVWPRTSELPSPPTLVTPEGPAFAVLLGLGLGLLAPLTVLLALYLLRKAWRLPNTPKPCWGNSFRTPIQEEHTDAHFTLAKI

SEQ ID NO: 76 - protein, 256 aa, Mus musculus
MGNNCYNVVVIVLLLVGCEKVGAVQNSCDNCQPGTFCRKYNPVCKSCPPSTFSSIGGQPNCNICRVCAGYFRFKKFCSSTHNAECECIEGFHCLGPQCTRCEKDCRPGQELTKQGCKTCSLGTFNDQNGTGVCRPWTNCSLDGRSVLKTGTTEKDVVCGPPVVSFSPSTTISVTPEGGPGGHSLQVLTLFLALTSALLLALIFITLLFSVLKWIRKKFPHIFKQPFKKTTGAAQEEDACSCRCPQEEEGGGGGYEL

SEQ ID NO: 77 - protein, 254 aa, cynomolgus
MGNSCYNIVATLLLVLNFERTRSLQDLCSNCPAGTFCDNNRSQICSPCPPNSFSSAGGQRTCDICRQCKGVFKTRKECSSTSNAECDCISGYHCLGAECSMCEQDCKQGQELTKKGCKDCCFGTFNDQKRGICRPWTNCSLDGKSVLVNGTKERDVVCGPSPADLSPGASSATPPAPAREPGHSPQIIFFLALTSTVVLFLLFFLVLRFSVVKRSRKKLLYIFKQPFMRPVQTTQEEDGCSCRFPEEEEGGCEL

SEQ ID NO: 78 - protein, 5 aa, Artificial sequence
  Peptide linker
GGGGS

SEQ ID NO: 79 - protein, 10 aa, Artificial sequence
  Peptide linker
GGGGSGGGGS

SEQ ID NO: 80 - protein, 10 aa, Artificial sequence
  Peptide linker
SGGGGSGGGG

SEQ ID NO: 81 - protein, 14 aa, Artificial sequence
  Peptide linker
GGGGSGGGGSGGGG

SEQ ID NO: 82 - protein, 10 aa, Artificial sequence
  Peptide linker
GSPGSSSSGS

SEQ ID NO: 83 - protein, 15 aa, Artificial sequence
  Peptide linker
GGGGSGGGGSGGGGS

SEQ ID NO: 84 - protein, 20 aa, Artificial sequence
  Peptide linker
GGGGSGGGGSGGGGSGGGGS

SEQ ID NO: 85 - protein, 8 aa, Artificial sequence
  Peptide linker
GSGSGSGS

SEQ ID NO: 86 - protein, 8 aa, Artificial sequence
  Peptide linker
GSGSGNGS

SEQ ID NO: 87 - protein, 8 aa, Artificial sequence
  Peptide linker
GGSGSGSG

SEQ ID NO: 88 - protein, 6 aa, Artificial sequence
  Peptide linker
GGSGSG

SEQ ID NO: 89 - protein, 4 aa, Artificial sequence
  Peptide linker
GGSG

SEQ ID NO: 90 - protein, 8 aa, Artificial sequence
  Peptide linker
GGSGNGSG

SEQ ID NO: 91 - protein, 8 aa, Artificial sequence
  Peptide linker
GGNGSGSG

SEQ ID NO: 92 - protein, 6 aa, Artificial sequence
  Peptide linker
GGNGSG

SEQ ID NO: 93 - protein, 186 aa, cynomolgus
LHCVGDTYPSNDRCCQECRPGNGMVSRCNRSQNTVCRPCGPGFYNDVVSAKPCKACTWCNLRSGSERKQPCTATQDTVCRCRAGTQPLDSYKPGVDCAPCPPGHFSPGDNQACKPWTNCTLAGKHTLQPASNSSDAICEDRDPPPTQPQETQGPPARPTTVQPTEAWPRTSQRPSTRPVEVPRGPA

SEQ ID NO: 94 - protein, 192 aa, Mus musculus
VTARRLNCVKHTYPSGHKCCRECQPGHGMVSRCDHTRDTLCHPCETGFYNEAVNYDTCKQCTQCNHRSGSELKQNCTPTQDTVCRCRPGTQPRQDSGYKLGVDCVPCPPGHFSPGNNQACKPWTNCTLSGKQTRHPASDSLDAVCEDRSLLATLLWETQRPTFRPTTVQSTTVWPRTSELPSPPTLVTPEGP

SEQ ID NO: 95 - DNA, 681 bp, Artificial sequence
  Fc hole chain
gacaaaactcacacatgcccaccgtgcccagcacctgaactcctggggggaccgtcagtcttcctcttccccccaaaacccaaggacaccctcatgatctcccggacccctgaggtcacatgcgtggtggtggacgtgagccacgaagaccctgaggtcaagttcaactggtacgtggacggcgtggaggtgcataatgccaagacaaagccgcgggaggagcagtacaacagcacgtaccgtgtggtcagcgtcctcaccgtcctgcaccaggactggctgaatggcaaggagtacaagtgcaaggtctccaacaaagccctcccagcccccatcgagaaaaccatctccaaagccaaagggcagccccgagaaccacaggtgtgcaccctgcccccatcccgggatgagctgaccaagaaccaggtcagcctctcgtgcgcagtcaaaggcttctatcccagcgacatcgccgtggagtgggagagcaatgggcagccggagaacaactacaagaccacgcctcccgtgctggactccgacggctccttcttcctcgtgagcaagctcaccgtggacaagagcaggtggcagcaggggaacgtcttctcatgctccgtgatgcatgaggctctgcacaaccactacacgcagaagagcctctccctgtctccgggtaaa

SEQ ID NO: 96 - DNA, 1335 bp, Artificial Sequence
  human OX40 antigen Fc knob chain
ctgcactgcgtgggcgacacctaccccagcaacgaccggtgctgccacgagtgcagacccggcaacggcatggtgtcccggtgcagccggtcccagaacaccgtgtgcagaccttgcggccctggcttctacaacgacgtggtgtccagcaagccctgcaagccttgtacctggtgcaacctgcggagcggcagcgagcggaagcagctgtgtaccgccacccaggataccgtgtgccggtgtagagccggcacccagcccctggacagctacaaacccggcgtggactgcgccccttgccctcctggccacttcagccctggcgacaaccaggcctgcaagccttggaccaactgcaccctggccggcaagcacaccctgcagcccgccagcaatagcagcgacgccatctgcgaggaccgggatcctcctgccacccagcctcaggaaacccagggccctcccgccagacccatcaccgtgcagcctacagaggcctggcccagaaccagccaggggcctagcaccagacccgtggaagtgcctggcggcagagccgtcgacgaacagttatattttcagggcggctcacccaaatctgcagacaaaactcacacatgcccaccgtgcccagcacctgaactcctggggggaccgtcagtcttcctcttccccccaaaacccaaggacaccctcatgatctcccggacccctgaggtcacatgcgtggtggtggacgtgagccacgaagaccctgaggtcaagttcaactggtacgtggacggcgtggaggtgcataatgccaagacaaagccgcgggaggagcagtacaacagcacgtaccgtgtggtcagcgtcctcaccgtcctgcaccaggactggctgaatggcaaggagtacaagtgcaaggtctccaacaaagccctcccagcccccatcgagaaaaccatctccaaagccaaagggcagccccgagaaccacaggtgtacaccctgcccccatgccgggatgagctgaccaagaaccaggtcagcctgtggtgcctggtcaaaggcttctatcccagcgacatcgccgtggagtgggagagcaatgggcagccggagaacaactacaagaccacgcctcccgtgctggactccgacggctccttcttcctctacagcaagctcaccgtggacaagagcaggtggcagcaggggaacgtcttctcatgctccgtgatgcatgaggctctgcacaaccactacacgcagaagagcctctccctgtctccgggtaaatccggaggcctgaacgacatcttcgaggcccagaagattgaatggcacgag

SEQ ID NO: 97 - DNA, 1335 bp, Artificial Sequence
  cynomolgus OX40 antigen Fc knob chain
ctccactgtgtcggggacacctaccccagcaacgaccggtgctgtcaggagtgcaggccaggcaacgggatggtgagccgctgcaaccgctcccagaacacggtgtgccgtccgtgcgggcccggcttctacaacgacgtggtcagcgccaagccctgcaaggcctgcacatggtgcaacctcagaagtgggagtgagcggaaacagccgtgcacggccacacaggacacagtctgccgctgccgggcgggcacccagcccctggacagctacaagcctggagttgactgtgccccctgccctccagggcacttctccccgggcgacaaccaggcctgcaagccctggaccaactgcaccttggccgggaagcacaccctgcagccagccagcaatagctcggacgccatctgtgaggacagggaccccccacccacacagccccaggagacccagggccccccggccaggcccaccactgtccagcccactgaagcctggcccagaacctcacagagaccctccacccggcccgtggaggtccccaggggccctgcggtcgacgaacagttatattttcagggcggctcacccaaatctgcagacaaaactcacacatgcccaccgtgcccagcacctgaactcctggggggaccgtcagtcttcctcttccccccaaaacccaaggacaccctcatgatctcccggacccctgaggtcacatgcgtggtggtggacgtgagccacgaagaccctgaggtcaagttcaactggtacgtggacggcgtggaggtgcataatgccaagacaaagccgcgggaggagcagtacaacagcacgtaccgtgtggtcagcgtcctcaccgtcctgcaccaggactggctgaatggcaaggagtacaagtgcaaggtctccaacaaagccctcccagcccccatcgagaaaaccatctccaaagccaaagggcagccccgagaaccacaggtgtacaccctgcccccatgccgggatgagctgaccaagaaccaggtcagcctgtggtgcctggtcaaaggcttctatcccagcgacatcgccgtggagtgggagagcaatgggcagccggagaacaactacaagaccacgcctcccgtgctggactccgacggctccttcttcctctacagcaagctcaccgtggacaagagcaggtggcagcaggggaacgtcttctcatgctccgtgatgcatgaggctctgcacaaccactacacgcagaagagcctctccctgtctccgggtaaatccggaggcctgaacgacatcttcgaggcccagaagattgaatggcacgag

SEQ ID NO: 98 - DNA, 1353 bp, Artificial Sequence
  murine OX40 antigen Fc knob chain
gtgaccgccagacggctgaactgcgtgaagcacacctaccccagcggccacaagtgctgcagagagtgccagcccggccacggcatggtgtccagatgcgaccacacacgggacaccctgtgccacccttgcgagacaggcttctacaacgaggccgtgaactacgatacctgcaagcagtgcacccagtgcaaccacagaagcggcagcgagctgaagcagaactgcacccccacccaggataccgtgtgcagatgcagacccggcacccagcccagacaggacagcggctacaagctgggcgtggactgcgtgccctgccctcctggccacttcagccccggcaacaaccaggcctgcaagccctggaccaactgcaccctgagcggcaagcagaccagacaccccgccagcgacagcctggatgccgtgtgcgaggacagaagcctgctggccaccctgctgtgggagacacagcggcccaccttcagacccaccaccgtgcagagcaccaccgtgtggcccagaaccagcgagctgcccagtcctcctaccctcgtgacacctgagggccccgtcgacgaacagttatattttcagggcggctcacccaaatctgcagacaaaactcacacatgcccaccgtgcccagcacctgaactcctggggggaccgtcagtcttcctcttccccccaaaacccaaggacaccctcatgatctcccggacccctgaggtcacatgcgtggtggtggacgtgagccacgaagaccctgaggtcaagttcaactggtacgtggacggcgtggaggtgcataatgccaagacaaagccgcgggaggagcagtacaacagcacgtaccgtgtggtcagcgtcctcaccgtcctgcaccaggactggctgaatggcaaggagtacaagtgcaaggtctccaacaaagccctcccagcccccatcgagaaaaccatctccaaagccaaagggcagccccgagaaccacaggtgtacaccctgcccccatgccgggatgagctgaccaagaaccaggtcagcctgtggtgcctggtcaaaggcttctatcccagcgacatcgccgtggagtgggagagcaatgggcagccggagaacaactacaagaccacgcctcccgtgctggactccgacggctccttcttcctctacagcaagctcaccgtggacaagagcaggtggcagcaggggaacgtcttctcatgctccgtgatgcatgaggctctgcacaaccactacacgcagaagagcctctccctgtctccgggtaaatccggaggcctgaacgacatcttcgaggcccagaagattgaatggcacgag

SEQ ID NO: 99 - protein, 227 aa, Artificial Sequence
  Fc hole chain
DKTHTCPPCPAPELLGGPSVFLFPPKPKDTLMISRTPEVTCVVVDVSHEDPEVKFNWYVDGVEVHNAKTKPREEQYNSTYRVVSVLTVLHQDWLNGKEYKCKVSNKALPAPIEKTISKAKGQPREPQVCTLPPSRDELTKNQVSLSCAVKGFYPSDIAVEWESNGQPENNYKTTPPVLDSDGSFFLVSKLTVDKSRWQQGNVFSCSVMHEALHNHYTQKSLSLSPGK

SEQ ID NO: 100 - protein, 445 aa, Artificial Sequence
  human OX40 antigen Fc knob chain
LHCVGDTYPSNDRCCHECRPGNGMVSRCSRSQNTVCRPCGPGFYNDVVSSKPCKPCTWCNLRSGSERKQLCTATQDTVCRCRAGTQPLDSYKPGVDCAPCPPGHFSPGDNQACKPWTNCTLAGKHTLQPASNSSDAICEDRDPPATQPQETQGPPARPITVQPTEAWPRTSQGPSTRPVEVPGGRAVDEQLYFQGGSPKSADKTHTCPPCPAPELLGGPSVFLFPPKPKDTLMISRTPEVTCVVVDVSHEDPEVKFNWYVDGVEVHNAKTKPREEQYNSTYRVVSVLTVLHQDWLNGKEYKCKVSNKALPAPIEKTISKAKGQPREPQVYTLPPCRDELTKNQVSLWCLVKGFYPSDIAVEWESNGQPENNYKTTPPVLDSDGSFFLYSKLTVDKSRWQQGNVFSCSVMHEALHNHYTQKSLSLSPGKSGGLNDIFEAQKIEWHE

SEQ ID NO: 101 - protein, 445 aa, Artificial Sequence
  cynomolgus OX40 antigen Fc knob chain
LHCVGDTYPSNDRCCQECRPGNGMVSRCNRSQNTVCRPCGPGFYNDVVSAKPCKACTWCNLRSGSERKQPCTATQDTVCRCRAGTQPLDSYKPGVDCAPCPPGHFSPGDNQACKPWTNCTLAGKHTLQPASNSSDAICEDRDPPPTQPQETQGPPARPTTVQPTEAWPRTSQRPSTRPVEVPRGPAVDEQLYFQGGSPKSADKTHTCPPCPAPELLGGPSVFLFPPKPKDTLMISRTPEVTCVVVDVSHEDPEVKFNWYVDGVEVHNAKTKPREEQYNSTYRVVSVLTVLHQDWLNGKEYKCKVSNKALPAPIEKTISKAKGQPREPQVYTLPPCRDELTKNQVSLWCLVKGFYPSDIAVEWESNGQPENNYKTTPPVLDSDGSFFLYSKLTVDKSRWQQGNVFSCSVMHEALHNHYTQKSLSLSPGKSGGLNDIFEAQKIEWHE

SEQ ID NO: 102 - protein, 451 aa, Artificial Sequence
  murine OX40 antigen Fc knob chain
VTARRLNCVKHTYPSGHKCCRECQPGHGMVSRCDHTRDTLCHPCETGFYNEAVNYDTCKQCTQCNHRSGSELKQNCTPTQDTVCRCRPGTQPRQDSGYKLGVDCVPCPPGHFSPGNNQACKPWTNCTLSGKQTRHPASDSLDAVCEDRSLLATLLWETQRPTFRPTTVQSTTVWPRTSELPSPPTLVTPEGPVDEQLYFQGGSPKSADKTHTCPPCPAPELLGGPSVFLFPPKPKDTLMISRTPEVTCVVVDVSHEDPEVKFNWYVDGVEVHNAKTKPREEQYNSTYRVVSVLTVLHQDWLNGKEYKCKVSNKALPAPIEKTISKAKGQPREPQVYTLPPCRDELTKNQVSLWCLVKGFYPSDIAVEWESNGQPENNYKTTPPVLDSDGSFFLYSKLTVDKSRWQQGNVFSCSVMHEALHNHYTQKSLSLSPGKSGGLNDIFEAQKIEWHE

SEQ ID NO: 103 - DNA, 1613 bp, Artificial Sequence
  pRJH33 library template DP88-4 library
tgaaatacctattgcctacggcagccgctggattgttattactcgcggcccagccggccatggccgacatccagatgacccagtctccttccaccctgtctgcatctgtaggagaccgtgtcaccatcacttgccgtgccagtcagagtattagtagctggttggcctggtatcagcagaaaccagggaaagcccctaagctcctgatctatgatgcctccagtttggaaagtggggtcccatcacgtttcagcggcagtggatccgggacagaattcactctcaccatcagcagcttgcagcctgatgattttgcaacttattactgccaacagtataatagttattctacgtttggccagggcaccaaagtcgagatcaagcgtacggtggctgcaccatctgtcttcatcttcccgccatctgatgagcagttgaaatctggaactgcctctgttgtgtgcctgctgaataacttctatcccagagaggccaaagtacagtggaaggtggataacgccctccaatcgggtaactcccaggagagtgtcacagagcaggacagcaaggacagcacctacagcctcagcagcaccctgacgctgagcaaagcagactacgagaaacacaaagtctacgcctgcgaagtcacccatcagggcctgagctcgcccgtcacaaagagcttcaacaggggagagtgtggagccgcagaacaaaaactcatctcagaagaggatctgaatggagccgcagactacaaggacgacgacgacaagggtgccgcataataaggcgcgccaattctatttcaaggagacagtcatatgaaatacctgctgccgaccgctgctgctggtctgctgctcctcgctgcccagccggcgatggcccaggtgcaattggtgcagtctggggctgaggtgaagaagcctgggtcctcggtgaaggtctcctgcaaggcctccggaggcacattcagcagctacgctataagctgggtgcgacaggcccctggacaagggctcgagtggatgggagggatcatccctatctttggtacagcaaactacgcacagaagttccagggcagggtcaccattactgcagacaaatccacgagcacagcctacatggagctgagcagcctgagatctgaggacaccgccgtgtattactgtgcgagactatccccaggcggttactatgttatggatgcctggggccaagggaccaccgtgaccgtctcctcagctagcaccaaaggcccatcggtcttccccctggcaccctcctccaagagcacctctgggggcacagcggccctgggctgcctggtcaaggactacttccccgaaccggtgacggtgtcgtggaactcaggcgccctgaccagcggcgtgcacaccttcccggctgtcctacagtcctcaggactctactccctcagcagcgtggtgaccgtgccctccagcagcttgggcacccagacctacatctgcaacgtgaatcacaagcccagcaacaccaaagtggacaagaaagttgagcccaaatcttgtgacgcggccgcaagcactagtgcccatcaccatcaccatcacgccgcggca

SEQ ID NO: 104 - DNA, 723 bp, Artificial Sequence
  Fab light chain Vk1_5
gacatccagatgacccagtctccttccaccctgtctgcatctgtaggagaccgtgtcaccatcacttgccgtgccagtcagagtattagtagctggttggcctggtatcagcagaaaccagggaaagcccctaagctcctgatctatgatgcctccagtttggaaagtggggtcccatcacgtttcagcggcagtggatccgggacagaattcactctcaccatcagcagcttgcagcctgatgattttgcaacttattactgccaacagtataatagttattctacgtttggccagggcaccaaagtcgagatcaagcgtacggtggctgcaccatctgtcttcatcttcccgccatctgatgagcagttgaaatctggaactgcctctgttgtgtgcctgctgaataacttctatcccagagaggccaaagtacagtggaaggtggataacgccctccaatcgggtaactcccaggagagtgtcacagagcaggacagcaaggacagcacctacagcctcagcagcaccctgacgctgagcaaagcagactacgagaaacacaaagtctacgcctgcgaagtcacccatcagggcctgagctcgcccgtcacaaagagcttcaacaggggagagtgtggagccgcagaacaaaaactcatctcagaagaggatctgaatggagccgcagactacaaggacgacgacgacaagggtgccgca

SEQ ID NO: 105 - protein, 241 aa, Artificial Sequence
  Fab light chain Vk1_5
DIQMTQSPSTLSASVGDRVTITCRASQSISSWLAWYQQKPGKAPKLLIYDASSLESGVPSRFSGSGSGTEFTLTISSLQPDDFATYYCQQYNSYSTFGQGTKVEIKRTVAAPSVFIFPPSDEQLKSGTASVVCLLNNFYPREAKVQWKVDNALQSGNSQESVTEQDSKDSTYSLSSTLTLSKADYEKHKVYACEVTHQGLSSPVTKSFNRGECGAAEQKLISEEDLNGAADYKDDDDKGAA

SEQ ID NO: 106 - DNA, 720 bp, Artificial Sequence
  Fab heavy chain VH1_69
caggtgcaattggtgcagtctggggctgaggtgaagaagcctgggtcctcggtgaaggtctcctgcaaggcctccggaggcacattcagcagctacgctataagctgggtgcgacaggcccctggacaagggctcgagtggatgggagggatcatccctatctttggtacagcaaactacgcacagaagttccagggcagggtcaccattactgcagacaaatccacgagcacagcctacatggagctgagcagcctgagatctgaggacaccgccgtgtattactgtgcgagactatccccaggcggttactatgttatggatgcctggggccaagggaccaccgtgaccgtctcctcagctagcaccaaaggcccatcggtcttccccctggcaccctcctccaagagcacctctgggggcacagcggccctgggctgcctggtcaaggactacttccccgaaccggtgacggtgtcgtggaactcaggcgccctgaccagcggcgtgcacaccttcccggctgtcctacagtcctcaggactctactccctcagcagcgtggtgaccgtgccctccagcagcttgggcacccagacctacatctgcaacgtgaatcacaagcccagcaacaccaaagtggacaagaaagttgagcccaaatcttgtgacgcggccgcaagcactagtgcccatcaccatcaccatcacgccgcggca

SEQ ID NO: 107 - protein, 240 aa, Artificial Sequence
  Fab heavy chain VH1_69
QVQLVQSGAEVKKPGSSVKVSCKASGGTFSSYAISWVRQAPGQGLEWMGGIIPIFGTANYAQKFQGRVTITADKSTSTAYMELSSLRSEDTAVYYCARLSPGGYYVMDAWGQGTTVTVSSASTKGPSVFPLAPSSKSTSGGTAALGCLVKDYFPEPVTVSWNSGALTSGVHTFPAVLQSSGLYSLSSVVTVPSSSLGTQTYICNVNHKPSNTKVDKKVEPKSCDAAASTSAHHHHHHAAA

SEQ ID NO: 108 - DNA, 26 bp, Artificial Sequence
  LMB3 Primer
caggaaacagctatgaccatgattac

SEQ ID NO: 109 - DNA, 71 bp, Artificial Sequence
  Vk1_5_L3r_S Primer
ctcgactttggtgccctggccaaacgtsbaatacgaattatactgttggcagtaataagttgcaaaatcat

SEQ ID NO: 110 - DNA, 74 bp, Artificial Sequence
  Vk1_5_L3r_SY Primer
ctcgactttggtgccctggccaaacgtmhrsgratacgaattatactgttggcagtaataagttgcaaaatcat

SEQ ID NO: 111 - DNA, 77 bp, Artificial Sequence
  Vk1_5_L3r_SPY
ctcgactttggtgccctggccaaacgtmhhmsssgratacgaattatactgttggcagtaataagttgcaaaatcat

SEQ ID NO: 112 - DNA, 27 bp, Artificial Sequence
  RJH31 Primer
acgtttggccagggcaccaaagtcgag

SEQ ID NO: 113 - DNA, 28 bp, Artificial Sequence
  RJH32 Primer
tctcgcacagtaatacacggcggtgtcc

SEQ ID NO: 114 - DNA, 64 bp, Artificial Sequence
  DP88-v4-4
ggacaccgccgtgtattactgtgcgagagactactggggccaagggaccaccgtgaccgtctcc

SEQ ID NO: 115 - DNA, 64 bp, Artificial Sequence; identical to SEQ ID NO: 114
  DP88-v4-6

SEQ ID NO: 116 - DNA, 64 bp, Artificial Sequence; identical to SEQ ID NO: 114
  DP88-v4-8

SEQ ID NO: 117 - DNA, 30 bp, Artificial Sequence
  fdseqlong Primer
gacgttagtaaatgaattttctgtatgagg

SEQ ID NO: 118 - DNA, 1596 bp, Artificial Sequence
  pRJH110 library template
atgaaatacctattgcctacggcagccgctggattgttattactcgcggcccagccggccatggccgaaatcgtgttaacgcagtctccaggcaccctgtctttgtctccaggggaaagagccaccctctcttgcagggccagtcagagtgttagcagcagctacttagcctggtaccagcagaaacctggccaggctcccaggctcctcatctatggagcatccagcagggccactggcatcccagacaggttcagtggcagtggatccgggacagacttcactctcaccatcagcagactggagcctgaagattttgcagtgtattactgtcagcagtatggtagctcaccgctgacgttcggccaggggaccaaagtggaaatcaaacgtacggtggctgcaccatctgtcttcatcttcccgccatctgatgagcagttgaaatctggaactgcctctgttgtgtgcctgctgaataacttctatcccagagaggccaaagtacagtggaaggtggataacgccctccaatcgggtaactcccaggagagtgtcacagagcaggacagcaaggacagcacctacagcctcagcagcaccctgacgctgagcaaagcagactacgagaaacacaaagtctacgcctgcgaagtcacccatcagggcctgagctcgcccgtcacaaagagcttcaacaggggagagtgtggagccgcacatcaccatcaccatcacggagccgcagactacaaggacgacgacgacaagggtgccgcataataaggcgcgccaattctatttcaaggagacagtcatatgaaatacctgctgccgaccgctgctgctggtctgctgctcctcgctgcccagccggcgatggccgaggtgcaattgctggagtctgggggaggcttggtacagcctggggggtccctgagactctcctgtgcagcctccggattcacctttagcagttatgccatgagctgggtccgccaggctccagggaaggggctggagtgggtctcagctattagtggtagtggtggtagcacatactacgcagactccgtgaagggccggttcaccatctccagagacaattccaagaacacgctgtatctgcagatgaacagcctgagagccgaggacacggccgtatattactgtgcgaaaccgtttccgtattttgactactggggccaaggaaccctggtcaccgtctcgagtgctagcaccaaaggcccatcggtcttccccctggcaccctcctccaagagcacctctgggggcacagcggccctgggctgcctggtcaaggactacttccccgaaccggtgacggtgtcgtggaactcaggcgccctgaccagcggcgtgcacaccttcccggctgtcctacagtcctcaggactctactccctcagcagcgtggtgaccgtgccctccagcagcttgggcacccagacctacatctgcaacgtgaatcacaagcccagcaacaccaaagtggacaagaaagttgagcccaaatcttgtgacgcggccgcagaacaaaaactcatctcagaagaggatctgaatgccgcggca

SEQ ID NO: 119 - DNA, 714 bp, Artificial Sequence
  Fab light chain Vk3_20
gaaatcgtgttaacgcagtctccaggcaccctgtctttgtctccaggggaaagagccaccctctcttgcagggccagtcagagtgttagcagcagctacttagcctggtaccagcagaaacctggccaggctcccaggctcctcatctatggagcatccagcagggccactggcatcccagacaggttcagtggcagtggatccgggacagacttcactctcaccatcagcagactggagcctgaagattttgcagtgtattactgtcagcagtatggtagctcaccgctgacgttcggccaggggaccaaagtggaaatcaaacgtacggtggctgcaccatctgtcttcatcttcccgccatctgatgagcagttgaaatctggaactgcctctgttgtgtgcctgctgaataacttctatcccagagaggccaaagtacagtggaaggtggataacgccctccaatcgggtaactcccaggagagtgtcacagagcaggacagcaaggacagcacctacagcctcagcagcaccctgacgctgagcaaagcagactacgagaaacacaaagtctacgcctgcgaagtcacccatcagggcctgagctcgcccgtcacaaagagcttcaacaggggagagtgtggagccgcacatcaccatcaccatcacggagccgcagactacaaggacgacgacgacaagggtgccgca

SEQ ID NO: 120 - protein, 238 aa, Artificial Sequence
  Fab light chain Vk3_20
EIVLTQSPGTLSLSPGERATLSCRASQSVSSSYLAWYQQKPGQAPRLLIYGASSRATGIPDRFSGSGSGTDFTLTISRLEPEDFAVYYCQQYGSSPLTFGQGTKVEIKRTVAAPSVFIFPPSDEQLKSGTASVVCLLNNFYPREAKVQWKVDNALQSGNSQESVTEQDSKDSTYSLSSTLTLSKADYEKHKVYACEVTHQGLSSPVTKSFNRGECGAAHHHHHHGAADYKDDDDKGAA

SEQ ID NO: 121 - DNA, 711 bp, Artificial Sequence
  Fab heavy chain VH3_23
gaggtgcaattgctggagtctgggggaggcttggtacagcctggggggtccctgagactctcctgtgcagcctccggattcacctttagcagttatgccatgagctgggtccgccaggctccagggaaggggctggagtgggtctcagctattagtggtagtggtggtagcacatactacgcagactccgtgaagggccggttcaccatctccagagacaattccaagaacacgctgtatctgcagatgaacagcctgagagccgaggacacggccgtatattactgtgcgaaaccgtttccgtattttgactactggggccaaggaaccctggtcaccgtctcgagtgctagcaccaaaggcccatcggtcttccccctggcaccctcctccaagagcacctctgggggcacagcggccctgggctgcctggtcaaggactacttccccgaaccggtgacggtgtcgtggaactcaggcgccctgaccagcggcgtgcacaccttcccggctgtcctacagtcctcaggactctactccctcagcagcgtggtgaccgtgccctccagcagcttgggcacccagacctacatctgcaacgtgaatcacaagcccagcaacaccaaagtggacaagaaagttgagcccaaatcttgtgacgcggccgcagaacaaaaactcatctcagaagaggatctgaatgccgcggca

SEQ ID NO: 122 - protein, 237 aa, Artificial Sequence
  Fab heavy chain VH3_23 (DP47)
EVQLLESGGGLVQPGGSLRLSCAASGFTFSSYAMSWVRQAPGKGLEWVSAISGSGGSTYYADSVKGRFTISRDNSKNTLYLQMNSLRAEDTAVYYCAKPFPYFDYWGQGTLVTVSSASTKGPSVFPLAPSSKSTSGGTAALGCLVKDYFPEPVTVSWNSGALTSGVHTFPAVLQSSGLYSLSSVVTVPSSSLGTQTYICNVNHKPSNTKVDKKVEPKSCDAAAEQKLISEEDLNAAA

SEQ ID NO: 123 - DNA, 25 bp, Artificial Sequence
  MS64 Primer
acgttcggccaggggaccaaagtgg

SEQ ID NO: 124 - DNA, 25 bp, Artificial Sequence
  DP47CDR3_ba Primer
cgcacagtaatatacggccgtgtcc

SEQ ID NO: 125 - DNA, 64 bp, Artificial Sequence
  DP47-v4-4
cgaggacacggccgtatattactgtgcggactactggggccaaggaaccctggtcaccgtctcg

SEQ ID NO: 126 - DNA, 64 bp, Artificial Sequence; identical to SEQ ID NO: 125
  DP47-v4-6

SEQ ID NO: 127 - DNA, 64 bp, Artificial Sequence; identical to SEQ ID NO: 125
  DP47-v4-8

SEQ ID NO: 128 - DNA, 30 bp, Artificial Sequence; identical to SEQ ID NO: 117
  fdseqlong

SEQ ID NO: 129 - DNA, 1605 bp, Artificial Sequence
  pRJH53 library template
atgaaatacctattgcctacggcagccgctggattgttattactcgcggcccagccggccatggcctcgtctgagctgactcaggaccctgctgtgtctgtggccttgggacagacagtcaggatcacatgccaaggagacagcctcagaagttattatgcaagctggtaccagcagaagccaggacaggcccctgtacttgtcatctatggtaaaaacaaccggccctcagggatcccagaccgattctctggctccagctcaggaaacacagcttccttgaccatcactggggctcaggcggaagatgaggctgactattactgtaactcccgtgatagtagcggtaatcatgtggtattcggcggagggaccaagctgaccgtcctaggacaacccaaggctgcccccagcgtgaccctgttcccccccagcagcgaggaattgcaggccaacaaggccaccctggtctgcctgatcagcgacttctacccaggcgccgtgaccgtggcctggaaggccgacagcagccccgtgaaggccggcgtggagaccaccacccccagcaagcagagcaacaacaagtacgccgccagcagctacctgagcctgacccccgagcagtggaagagccacaggtcctacagctgccaggtgacccacgagggcagcaccgtggagaaaaccgtggcccccaccgagtgcagcggagccgcagaacaaaaactcatctcagaagaggatctgaatggagccgcagactacaaggacgacgacgacaagggtgccgcataataaggcgcgccaattctatttcaaggagacagtcatatgaaatacctgctgccgaccgctgctgctggtctgctgctcctcgctgcccagccggcgatggccgaggtgcaattgctggagtctgggggaggcttggtacagcctggggggtccctgagactctcctgtgcagcctccggattcacctttagcagttatgccatgagctgggtccgccaggctccagggaaggggctggagtgggtctcagctattagtggtagtggtggtagcacatactacgcagactccgtgaagggccggttcaccatctccagagacaattccaagaacacgctgtatctgcagatgaacagcctgagagccgaggacacggccgtatattactgtgcgaaaccgtttccgtattttgactactggggccaaggaaccctggtcaccgtctcgagtgctagcaccaaaggcccatcggtcttccccctggcaccctcctccaagagcacctctgggggcacagcggccctgggctgcctggtcaaggactacttccccgaaccggtgacggtgtcgtggaactcaggcgccctgaccagcggcgtgcacaccttcccggctgtcctacagtcctcaggactctactccctcagcagcgtggtgaccgtgccctccagcagcttgggcacccagacctacatctgcaacgtgaatcacaagcccagcaacaccaaagtggacaagaaagttgagcccaaatcttgtgacgcggccgcaagcactagtgcccatcaccatcaccatcacgccgcggca

SEQ ID NO: 130 - DNA, 726 bp, Artificial Sequence
  Fab light chain Vl3_19
tcgtctgagctgactcaggaccctgctgtgtctgtggccttgggacagacagtcaggatcacatgccaaggagacagcctcagaagttattatgcaagctggtaccagcagaagccaggacaggcccctgtacttgtcatctatggtaaaaacaaccggccctcagggatcccagaccgattctctggctccagctcaggaaacacagcttccttgaccatcactggggctcaggcggaagatgaggctgactattactgtaactcccgtgatagtagcggtaatcatgtggtattcggcggagggaccaagctgaccgtcctaggacaacccaaggctgcccccagcgtgaccctgttcccccccagcagcgaggaattgcaggccaacaaggccaccctggtctgcctgatcagcgacttctacccaggcgccgtgaccgtggcctggaaggccgacagcagccccgtgaaggccggcgtggagaccaccacccccagcaagcagagcaacaacaagtacgccgccagcagctacctgagcctgacccccgagcagtggaagagccacaggtcctacagctgccaggtgacccacgagggcagcaccgtggagaaaaccgtggcccccaccgagtgcagcggagccgcagaacaaaaactcatctcagaagaggatctgaatggagccgcagactacaaggacgacgacgacaagggtgccgca

SEQ ID NO: 131 - protein, 242 aa, Artificial Sequence
  Fab light chain Vl3_19
SSELTQDPAVSVALGQTVRITCQGDSLRSYYASWYQQKPGQAPVLVIYGKNNRPSGIPDRFSGSSSGNTASLTITGAQAEDEADYYCNSRDSSGNHVVFGGGTKLTVLGQPKAAPSVTLFPPSSEELQANKATLVCLISDFYPGAVTVAWKADSSPVKAGVETTTPSKQSNNKYAASSYLSLTPEQWKSHRSYSCQVTHEGSTVEKTVAPTECSGAAEQKLISEEDLNGAADYKDDDDKGAA

SEQ ID NO: 132 - DNA, 26 bp, Artificial Sequence
  LMB3 lambda-DP47 library
caggaaacagctatgaccatgattac

SEQ ID NO: 133 - DNA, 85 bp, Artificial Sequence
  Vl_3_19_L3r_V lambda-DP47 library
ggacggtcagcttggtccctccgccgaatacvhvattaccgctactatcacgggagttacagtaatagtcagcctcatcttccgc

SEQ ID NO: 134 - DNA, 88 bp, Artificial Sequence
  Vl_3_19_L3r_HV lambda-DP47
ggacggtcagcttggtccctccgccgaataccmmatgattaccgctactatcacgggagttacagtaatagtcagcctcatcttccgc

SEQ ID NO: 135 - DNA, 91 bp, Artificial Sequence
  Vl_3_19_L3r_HLV lambda-DP47
ggacggtcagcttggtccctccgccgaatacrhmvwgatgattaccgctactatcacgggagttacagtaatagtcagcctcatcttccgc

SEQ ID NO: 136 - DNA, 28 bp, Artificial Sequence
  RJH80 lambda-DP47
ttcggcggagggaccaagctgaccgtcc

SEQ ID NO: 137 - DNA, 318 bp, Artificial Sequence
  DNA (8H9 ) VL
tcgtctgagctgactcaggaccctgctgtgtctgtggccttgggacagacagtcaggatcacatgccaaggagacagcctcagaagttattatgcaagctggtaccagcagaagccaggacaggcccctgtacttgtcatctatggtaaaaacaaccggccctcagggatcccagaccgattctctggctccagctcaggaaacacagcttccttgaccatcactggggctcaggcggaagatgaggctgactattactgtaactcccgtgttatgcctcataatcgcgtattcggcggagggaccaagctgaccgtc

SEQ ID NO: 138 - DNA, 360 bp, Artificial Sequence
  DNA (8H9) VH
gaggtgcaattgttggagtctgggggaggcttggtacagcctggggggtccctgagactctcctgtgcagcctccggattcacctttagcagttatgccatgagctgggtccgccaggctccagggaaggggctggagtgggtctcagctattagtggtagtggtggtagcacatactacgcagactccgtgaagggccggttcaccatctccagagacaattccaagaacacgctgtatctgcagatgaacagcctgagagccgaggacacggccgtatattactgtgcgcgtgttttctaccgtggtggtgtttctatggactactggggccaaggaaccctggtcaccgtctcgagt

SEQ ID NO: 139 - DNA, 321 bp, Artificial  Sequence
  DNA (49B4) VL
gacatccagatgacccagtctccttccaccctgtctgcatctgtaggagaccgtgtcaccatcacttgccgtgccagtcagagtattagtagctggttggcctggtatcagcagaaaccagggaaagcccctaagctcctgatctatgatgcctccagtttggaaagtggggtcccatcacgtttcagcggcagtggatccgggacagaattcactctcaccatcagcagcttgcagcctgatgattttgcaacttattactgccaacagtatagttcgcagccgtatacgtttggccagggcaccaaagtcgagatcaag

SEQ ID NO: 140 - DNA, 354 bp, Artificial Sequence
  DNA (49B4) VH
caggtgcaattggtgcagtctggggctgaggtgaagaagcctgggtcctcggtgaaggtctcctgcaaggcctccggaggcacattcagcagctacgctataagctgggtgcgacaggcccctggacaagggctcgagtggatgggagggatcatccctatctttggtacagcaaactacgcacagaagttccagggcagggtcaccattactgcagacaaatccacgagcacagcctacatggagctgagcagcctgagatctgaggacaccgccgtgtattactgtgcgagagaatactaccgtggtccgtacgactactggggccaagggaccaccgtgaccgtctcctca

SEQ ID NO: 141 - DNA, 324 bp, Artificial Sequence
  DNA (1G4) VL
gacatccagatgacccagtctccttccaccctgtctgcatctgtaggagaccgtgtcaccatcacttgccgtgccagtcagagtattagtagctggttggcctggtatcagcagaaaccagggaaagcccctaagctcctgatctatgatgcctccagtttggaaagtggggtcccatcacgtttcagcggcagtggatccgggacagaattcactctcaccatcagcagcttgcagcctgatgattttgcaacttattactgccaacagtatatttcgtattccatgttgacgtttggccagggcaccaaagtcgagatcaag

SEQ ID NO: 142 - DNA, 348 bp, Artificial Sequence
  DNA (1G4) VH
caggtgcaattggtgcagtctggggctgaggtgaagaagcctgggtcctcggtgaaggtctcctgcaaggcctccggaggcacattcagcagctacgctataagctgggtgcgacaggcccctggacaagggctcgagtggatgggagggatcatccctatctttggtacagcaaactacgcacagaagttccagggcagggtcaccattactgcagacaaatccacgagcacagcctacatggagctgagcagcctgagatctgaggacaccgccgtgtattactgtgcgagagaatacggttctatggactactggggccaagggaccaccgtgaccgtctcctca

SEQ ID NO: 143 - DNA, 321 bp, Artificial Sequence
  DNA (20B7) VL
gacatccagatgacccagtctccttccaccctgtctgcatctgtaggagaccgtgtcaccatcacttgccgtgccagtcagagtattagtagctggttggcctggtatcagcagaaaccagggaaagcccctaagctcctgatctatgatgcctccagtttggaaagtggggtcccatcacgtttcagcggcagtggatccgggacagaattcactctcaccatcagcagcttgcagcctgatgattttgcaacttattactgccaacagtatcaggctttttcgcttacgtttggccagggcaccaaagtcgagatcaag

SEQ ID NO: 144 - DNA, 366 bp, Artificial Sequence
  DNA (20B7) VH
caggtgcaattggtgcagtctggggctgaggtgaagaagcctgggtcctcggtgaaggtctcctgcaaggcctccggaggcacattcagcagctacgctataagctgggtgcgacaggcccctggacaagggctcgagtggatgggagggatcatccctatctttggtacagcaaactacgcacagaagttccagggcagggtcaccattactgcagacaaatccacgagcacagcctacatggagctgagcagcctgagatctgaggacaccgccgtgtattactgtgcgagagttaactacccgtactcttactggggtgacttcgactactggggccaagggaccaccgtgaccgtctcctca

SEQ ID NO: 145 - DNA, 324 bp, Artificial Sequence
  DNA (CLC-563) VL
gagatcgtgctgacccagagccccggcacactctccctgtctcctggggaaagggccaccctttcatgcagagccagccagtccgtctctagtagctacctggcatggtatcagcagaagccaggacaagccccccgcctcctgatttacggcgcttcctctcgggcaactggtatccctgacaggttctcagggagcggaagcggaacagattttaccttgactatttctagactggagccagaggacttcgccgtgtattactgtcagcagtacggtagtagccccctcacctttggccaggggacaaaagtcgaaatcaag

SEQ ID NO: 146 - DNA, 348 bp, Artificial Sequence
  DNA (CLC-563) VH
gaggtgcaattgttggagtctgggggaggcttggtacagcctggggggtccctgagactctcctgtgcagcctccggattcacctttagcagttatgccatgagctgggtccgccaggctccagggaaggggctggagtgggtctcagctattagtggtagtggtggtagcacatactacgcagactccgtgaagggccggttcaccatctccagagacaattccaagaacacgctgtatctgcagatgaacagcctgagagccgaggacacggccgtatattactgtgcgcttgacgttggtgctttcgactactggggccaaggagccctggtcaccgtctcgagt

SEQ ID NO: 147 - DNA, 324 bp, Artificial Sequence; identical to SEQ ID NO: 145
  DNA (CLC-564) VL

SEQ ID NO: 148 - DNA, 348 bp, Artificial Sequence
  DNA (CLC-564) VH
gaggtgcaattgttggagtctgggggaggcttggtacagcctggggggtccctgagactctcctgtgcagcctccggattcacctttagcagttatgccatgagctgggtccgccaggctccagggaaggggctggagtgggtctcagctattagtggtagtggtggtagcacatactacgcagactccgtgaagggccggttcaccatctccagagacaattccaagaacacgctgtatctgcagatgaacagcctgagagccgaggacacggccgtatattactgtgcgttcgacgttggtccgttcgactactggggccaaggaaccctggtcaccgtctcgagt

SEQ ID NO: 149 - DNA, 318 bp, Artificial Sequence; identical to SEQ ID NO: 137
  DNA (17A9) VL

SEQ ID NO: 150 - DNA, 360 bp, Artificial Sequence; identical to SEQ ID NO: 138
  DNA (17A9) VH

SEQ ID NO: 151 - DNA, 645 bp, Artificial Sequence
  DNA 8B9 light chain
gacatccagatgacccagtctccttccaccctgtctgcatctgtaggagaccgtgtcaccatcacttgccgtgccagtcagagtattagtagctggttggcctggtatcagcagaaaccagggaaagcccctaagctcctgatctatgatgcctccagtttggaaagtggggtcccatcacgtttcagcggcagtggatccgggacagaattcactctcaccatcagcagcttgcagcctgatgattttgcaacttattactgccaacagtatttgacgtattcgcggtttacgtttggccagggcaccaaagtcgagatcaagcgtacggtggctgcaccatctgtcttcatcttcccgccatctgatgagcagttgaaatctggaactgcctctgttgtgtgcctgctgaataacttctatcccagagaggccaaagtacagtggaaggtggataacgccctccaatcgggtaactcccaggagagtgtcacagagcaggacagcaaggacagcacctacagcctcagcagcaccctgacgctgagcaaagcagactacgagaaacacaaagtctacgcctgcgaagtcacccatcagggcctgagctcgcccgtcacaaagagcttcaacaggggagagtgt

SEQ ID NO: 152 - DNA, 1338 bp, Artificial Sequence
  DNA 8B9 heavy chain
caggtgcaattggtgcagtctggggctgaggtgaagaagcctgggtcctcggtgaaggtctcctgcaaggcctccggaggcacattcagcagctacgctataagctgggtgcgacaggcccctggacaagggctcgagtggatgggagggatcatccctatctttggtacagcaaactacgcacagaagttccagggcagggtcaccattactgcagacaaatccacgagcacagcctacatggagctgagcagcctgagatctgaggacaccgccgtgtattactgtgcgagagaatacggttggatggactactggggccaagggaccaccgtgaccgtctcctcagctagcaccaagggcccatcggtcttccccctggcaccctcctccaagagcacctctgggggcacagcggccctgggctgcctggtcaaggactacttccccgaaccggtgacggtgtcgtggaactcaggcgccctgaccagcggcgtgcacaccttcccggctgtcctacagtcctcaggactctactccctcagcagcgtggtgaccgtgccctccagcagcttgggcacccagacctacatctgcaacgtgaatcacaagcccagcaacaccaaggtggacaagaaagttgagcccaaatcttgtgacaaaactcacacatgcccaccgtgcccagcacctgaagctgcagggggaccgtcagtcttcctcttccccccaaaacccaaggacaccctcatgatctcccggacccctgaggtcacatgcgtggtggtggacgtgagccacgaagaccctgaggtcaagttcaactggtacgtggacggcgtggaggtgcataatgccaagacaaagccgcgggaggagcagtacaacagcacgtaccgtgtggtcagcgtcctcaccgtcctgcaccaggactggctgaatggcaaggagtacaagtgcaaggtctccaacaaagccctcggcgcccccatcgagaaaaccatctccaaagccaaagggcagccccgagaaccacaggtgtacaccctgcccccatcccgggatgagctgaccaagaaccaggtcagcctgacctgcctggtcaaaggcttctatcccagcgacatcgccgtggagtgggagagcaatgggcagccggagaacaactacaagaccacgcctcccgtgctggactccgacggctccttcttcctctacagcaagctcaccgtggacaagagcaggtggcagcaggggaacgtcttctcatgctccgtgatgcatgaggctctgcacaaccactacacgcagaagagcctctccctgtctccgggtaaa

SEQ ID NO: 153 - protein, 215 aa, Artificial Sequence
  8B9 light chain
DIQMTQSPSTLSASVGDRVTITCRASQSISSWLAWYQQKPGKAPKLLIYDASSLESGVPSRFSGSGSGTEFTLTISSLQPDDFATYYCQQYLTYSRFTFGQGTKVEIKRTVAAPSVFIFPPSDEQLKSGTASVVCLLNNFYPREAKVQWKVDNALQSGNSQESVTEQDSKDSTYSLSSTLTLSKADYEKHKVYACEVTHQGLSSPVTKSFNRGEC

SEQ ID NO: 154 - protein, 446 aa, Artificial Sequence
  8B9 Heavy chain
QVQLVQSGAEVKKPGSSVKVSCKASGGTFSSYAISWVRQAPGQGLEWMGGIIPIFGTANYAQKFQGRVTITADKSTSTAYMELSSLRSEDTAVYYCAREYGWMDYWGQGTTVTVSSASTKGPSVFPLAPSSKSTSGGTAALGCLVKDYFPEPVTVSWNSGALTSGVHTFPAVLQSSGLYSLSSVVTVPSSSLGTQTYICNVNHKPSNTKVDKKVEPKSCDKTHTCPPCPAPEAAGGPSVFLFPPKPKDTLMISRTPEVTCVVVDVSHEDPEVKFNWYVDGVEVHNAKTKPREEQYNSTYRVVSVLTVLHQDWLNGKEYKCKVSNKALGAPIEKTISKAKGQPREPQVYTLPPSRDELTKNQVSLTCLVKGFYPSDIAVEWESNGQPENNYKTTPPVLDSDGSFFLYSKLTVDKSRWQQGNVFSCSVMHEALHNHYTQKSLSLSPGK

SEQ ID NO: 155 - DNA, 642 bp, Artificial Sequence
  DNA 49B4 light chain
gacatccagatgacccagtctccttccaccctgtctgcatctgtaggagaccgtgtcaccatcacttgccgtgccagtcagagtattagtagctggttggcctggtatcagcagaaaccagggaaagcccctaagctcctgatctatgatgcctccagtttggaaagtggggtcccatcacgtttcagcggcagtggatccgggacagaattcactctcaccatcagcagcttgcagcctgatgattttgcaacttattactgccaacagtatagttcgcagccgtatacgtttggccagggcaccaaagtcgagatcaagcgtacggtggctgcaccatctgtcttcatcttcccgccatctgatgagcagttgaaatctggaactgcctctgttgtgtgcctgctgaataacttctatcccagagaggccaaagtacagtggaaggtggataacgccctccaatcgggtaactcccaggagagtgtcacagagcaggacagcaaggacagcacctacagcctcagcagcaccctgacgctgagcaaagcagactacgagaaacacaaagtctacgcctgcgaagtcacccatcagggcctgagctcgcccgtcacaaagagcttcaacaggggagagtgt

SEQ ID NO: 156 - DNA, 1344 bp, Artificial Sequence
  DNA 49B4 heavy chain
caggtgcaattggtgcagtctggggctgaggtgaagaagcctgggtcctcggtgaaggtctcctgcaaggcctccggaggcacattcagcagctacgctataagctgggtgcgacaggcccctggacaagggctcgagtggatgggagggatcatccctatctttggtacagcaaactacgcacagaagttccagggcagggtcaccattactgcagacaaatccacgagcacagcctacatggagctgagcagcctgagatctgaggacaccgccgtgtattactgtgcgagagaatactaccgtggtccgtacgactactggggccaagggaccaccgtgaccgtctcctcagctagcaccaagggcccatcggtcttccccctggcaccctcctccaagagcacctctgggggcacagcggccctgggctgcctggtcaaggactacttccccgaaccggtgacggtgtcgtggaactcaggcgccctgaccagcggcgtgcacaccttcccggctgtcctacagtcctcaggactctactccctcagcagcgtggtgaccgtgccctccagcagcttgggcacccagacctacatctgcaacgtgaatcacaagcccagcaacaccaaggtggacaagaaagttgagcccaaatcttgtgacaaaactcacacatgcccaccgtgcccagcacctgaagctgcagggggaccgtcagtcttcctcttccccccaaaacccaaggacaccctcatgatctcccggacccctgaggtcacatgcgtggtggtggacgtgagccacgaagaccctgaggtcaagttcaactggtacgtggacggcgtggaggtgcataatgccaagacaaagccgcgggaggagcagtacaacagcacgtaccgtgtggtcagcgtcctcaccgtcctgcaccaggactggctgaatggcaaggagtacaagtgcaaggtctccaacaaagccctcggcgcccccatcgagaaaaccatctccaaagccaaagggcagccccgagaaccacaggtgtacaccctgcccccatcccgggatgagctgaccaagaaccaggtcagcctgacctgcctggtcaaaggcttctatcccagcgacatcgccgtggagtgggagagcaatgggcagccggagaacaactacaagaccacgcctcccgtgctggactccgacggctccttcttcctctacagcaagctcaccgtggacaagagcaggtggcagcaggggaacgtcttctcatgctccgtgatgcatgaggctctgcacaaccactacacgcagaagagcctctccctgtctccgggtaaa

SEQ ID NO: 157 - protein, 214 aa, Artificial Sequence
  49B4 light chain
DIQMTQSPSTLSASVGDRVTITCRASQSISSWLAWYQQKPGKAPKLLIYDASSLESGVPSRFSGSGSGTEFTLTISSLQPDDFATYYCQQYSSQPYTFGQGTKVEIKRTVAAPSVFIFPPSDEQLKSGTASVVCLLNNFYPREAKVQWKVDNALQSGNSQESVTEQDSKDSTYSLSSTLTLSKADYEKHKVYACEVTHQGLSSPVTKSFNRGEC

SEQ ID NO: 158 - protein, 448 aa, Artificial Sequence
  49B4 heavy chain
QVQLVQSGAEVKKPGSSVKVSCKASGGTFSSYAISWVRQAPGQGLEWMGGIIPIFGTANYAQKFQGRVTITADKSTSTAYMELSSLRSEDTAVYYCAREYYRGPYDYWGQGTTVTVSSASTKGPSVFPLAPSSKSTSGGTAALGCLVKDYFPEPVTVSWNSGALTSGVHTFPAVLQSSGLYSLSSVVTVPSSSLGTQTYICNVNHKPSNTKVDKKVEPKSCDKTHTCPPCPAPEAAGGPSVFLFPPKPKDTLMISRTPEVTCVVVDVSHEDPEVKFNWYVDGVEVHNAKTKPREEQYNSTYRVVSVLTVLHQDWLNGKEYKCKVSNKALGAPIEKTISKAKGQPREPQVYTLPPSRDELTKNQVSLTCLVKGFYPSDIAVEWESNGQPENNYKTTPPVLDSDGSFFLYSKLTVDKSRWQQGNVFSCSVMHEALHNHYTQKSLSLSPGK

SEQ ID NO: 159 - DNA, 645 bp, Artficial Sequence
gacatccagatgacccagtctccttccaccctgtctgcatctgtaggagaccgtgtcaccatcacttgccgtgccagtcagagtattagtagctggttggcctggtatcagcagaaaccagggaaagcccctaagctcctgatctatgatgcctccagtttggaaagtggggtcccatcacgtttcagcggcagtggatccgggacagaattcactctcaccatcagcagcttgcagcctgatgattttgcaacttattactgccaacagtatatttcgtattccatgttgacgtttggccagggcaccaaagtcgagatcaagcgtacggtggctgcaccatctgtcttcatcttcccgccatctgatgagcagttgaaatctggaactgcctctgttgtgtgcctgctgaataacttctatcccagagaggccaaagtacagtggaaggtggataacgccctccaatcgggtaactcccaggagagtgtcacagagcaggacagcaaggacagcacctacagcctcagcagcaccctgacgctgagcaaagcagactacgagaaacacaaagtctacgcctgcgaagtcacccatcagggcctgagctcgcccgtcacaaagagcttcaacaggggagagtgt

SEQ ID NO: 160 - DNA, 1338 bp, Artificial Sequence
  DNA 1G4 heavy chain
caggtgcaattggtgcagtctggggctgaggtgaagaagcctgggtcctcggtgaaggtctcctgcaaggcctccggaggcacattcagcagctacgctataagctgggtgcgacaggcccctggacaagggctcgagtggatgggagggatcatccctatctttggtacagcaaactacgcacagaagttccagggcagggtcaccattactgcagacaaatccacgagcacagcctacatggagctgagcagcctgagatctgaggacaccgccgtgtattactgtgcgagagaatacggttctatggactactggggccaagggaccaccgtgaccgtctcctcagctagcaccaagggcccatcggtcttccccctggcaccctcctccaagagcacctctgggggcacagcggccctgggctgcctggtcaaggactacttccccgaaccggtgacggtgtcgtggaactcaggcgccctgaccagcggcgtgcacaccttcccggctgtcctacagtcctcaggactctactccctcagcagcgtggtgaccgtgccctccagcagcttgggcacccagacctacatctgcaacgtgaatcacaagcccagcaacaccaaggtggacaagaaagttgagcccaaatcttgtgacaaaactcacacatgcccaccgtgcccagcacctgaagctgcagggggaccgtcagtcttcctcttccccccaaaacccaaggacaccctcatgatctcccggacccctgaggtcacatgcgtggtggtggacgtgagccacgaagaccctgaggtcaagttcaactggtacgtggacggcgtggaggtgcataatgccaagacaaagccgcgggaggagcagtacaacagcacgtaccgtgtggtcagcgtcctcaccgtcctgcaccaggactggctgaatggcaaggagtacaagtgcaaggtctccaacaaagccctcggcgcccccatcgagaaaaccatctccaaagccaaagggcagccccgagaaccacaggtgtacaccctgcccccatcccgggatgagctgaccaagaaccaggtcagcctgacctgcctggtcaaaggcttctatcccagcgacatcgccgtggagtgggagagcaatgggcagccggagaacaactacaagaccacgcctcccgtgctggactccgacggctccttcttcctctacagcaagctcaccgtggacaagagcaggtggcagcaggggaacgtcttctcatgctccgtgatgcatgaggctctgcacaaccactacacgcagaagagcctctccctgtctccgggtaaa

SEQ ID NO: 161 - protein, 215 aa, Artificial Sequence
  1G4 light chain
DIQMTQSPSTLSASVGDRVTITCRASQSISSWLAWYQQKPGKAPKLLIYDASSLESGVPSRFSGSGSGTEFTLTISSLQPDDFATYYCQQYISYSMLTFGQGTKVEIKRTVAAPSVFIFPPSDEQLKSGTASVVCLLNNFYPREAKVQWKVDNALQSGNSQESVTEQDSKDSTYSLSSTLTLSKADYEKHKVYACEVTHQGLSSPVTKSFNRGEC

SEQ ID NO: 162 - protein, 446 aa, Artificial Sequence
  1G4 heavy chain
QVQLVQSGAEVKKPGSSVKVSCKASGGTFSSYAISWVRQAPGQGLEWMGGIIPIFGTANYAQKFQGRVTITADKSTSTAYMELSSLRSEDTAVYYCAREYGSMDYWGQGTTVTVSSASTKGPSVFPLAPSSKSTSGGTAALGCLVKDYFPEPVTVSWNSGALTSGVHTFPAVLQSSGLYSLSSVVTVPSSSLGTQTYICNVNHKPSNTKVDKKVEPKSCDKTHTCPPCPAPEAAGGPSVFLFPPKPKDTLMISRTPEVTCVVVDVSHEDPEVKFNWYVDGVEVHNAKTKPREEQYNSTYRVVSVLTVLHQDWLNGKEYKCKVSNKALGAPIEKTISKAKGQPREPQVYTLPPSRDELTKNQVSLTCLVKGFYPSDIAVEWESNGQPENNYKTTPPVLDSDGSFFLYSKLTVDKSRWQQGNVFSCSVMHEALHNHYTQKSLSLSPGK

SEQ ID NO: 163 - DNA, 642 bp, Artificial sequence
  DNA 20B7 light chain
gacatccagatgacccagtctccttccaccctgtctgcatctgtaggagaccgtgtcaccatcacttgccgtgccagtcagagtattagtagctggttggcctggtatcagcagaaaccagggaaagcccctaagctcctgatctatgatgcctccagtttggaaagtggggtcccatcacgtttcagcggcagtggatccgggacagaattcactctcaccatcagcagcttgcagcctgatgattttgcaacttattactgccaacagtatcaggctttttcgcttacgtttggccagggcaccaaagtcgagatcaagcgtacggtggctgcaccatctgtcttcatcttcccgccatctgatgagcagttgaaatctggaactgcctctgttgtgtgcctgctgaataacttctatcccagagaggccaaagtacagtggaaggtggataacgccctccaatcgggtaactcccaggagagtgtcacagagcaggacagcaaggacagcacctacagcctcagcagcaccctgacgctgagcaaagcagactacgagaaacacaaagtctacgcctgcgaagtcacccatcagggcctgagctcgcccgtcacaaagagcttcaacaggggagagtgt

SEQ ID NO: 164 - DNA, 1356 bp, Artificial Sequence
  DNA 20B7 heavy chain
caggtgcaattggtgcagtctggggctgaggtgaagaagcctgggtcctcggtgaaggtctcctgcaaggcctccggaggcacattcagcagctacgctataagctgggtgcgacaggcccctggacaagggctcgagtggatgggagggatcatccctatctttggtacagcaaactacgcacagaagttccagggcagggtcaccattactgcagacaaatccacgagcacagcctacatggagctgagcagcctgagatctgaggacaccgccgtgtattactgtgcgagagttaactacccgtactcttactggggtgacttcgactactggggccaagggaccaccgtgaccgtctcctcagctagcaccaagggcccatcggtcttccccctggcaccctcctccaagagcacctctgggggcacagcggccctgggctgcctggtcaaggactacttccccgaaccggtgacggtgtcgtggaactcaggcgccctgaccagcggcgtgcacaccttcccggctgtcctacagtcctcaggactctactccctcagcagcgtggtgaccgtgccctccagcagcttgggcacccagacctacatctgcaacgtgaatcacaagcccagcaacaccaaggtggacaagaaagttgagcccaaatcttgtgacaaaactcacacatgcccaccgtgcccagcacctgaagctgcagggggaccgtcagtcttcctcttccccccaaaacccaaggacaccctcatgatctcccggacccctgaggtcacatgcgtggtggtggacgtgagccacgaagaccctgaggtcaagttcaactggtacgtggacggcgtggaggtgcataatgccaagacaaagccgcgggaggagcagtacaacagcacgtaccgtgtggtcagcgtcctcaccgtcctgcaccaggactggctgaatggcaaggagtacaagtgcaaggtctccaacaaagccctcggcgcccccatcgagaaaaccatctccaaagccaaagggcagccccgagaaccacaggtgtacaccctgcccccatcccgggatgagctgaccaagaaccaggtcagcctgacctgcctggtcaaaggcttctatcccagcgacatcgccgtggagtgggagagcaatgggcagccggagaacaactacaagaccacgcctcccgtgctggactccgacggctccttcttcctctacagcaagctcaccgtggacaagagcaggtggcagcaggggaacgtcttctcatgctccgtgatgcatgaggctctgcacaaccactacacgcagaagagcctctccctgtctccgggtaaa

SEQ ID NO: 165 - protein, 214 aa, Artificial
  20B7 Light chain
DIQMTQSPSTLSASVGDRVTITCRASQSISSWLAWYQQKPGKAPKLLIYDASSLESGVPSRFSGSGSGTEFTLTISSLQPDDFATYYCQQYQAFSLTFGQGTKVEIKRTVAAPSVFIFPPSDEQLKSGTASVVCLLNNFYPREAKVQWKVDNALQSGNSQESVTEQDSKDSTYSLSSTLTLSKADYEKHKVYACEVTHQGLSSPVTKSFNRGEC

SEQ ID NO: 166 - protein, 452 aa, Artificial
  20B7 heavy chain
QVQLVQSGAEVKKPGSSVKVSCKASGGTFSSYAISWVRQAPGQGLEWMGGIIPIFGTANYAQKFQGRVTITADKSTSTAYMELSSLRSEDTAVYYCARVNYPYSYWGDFDYWGQGTTVTVSSASTKGPSVFPLAPSSKSTSGGTAALGCLVKDYFPEPVTVSWNSGALTSGVHTFPAVLQSSGLYSLSSVVTVPSSSLGTQTYICNVNHKPSNTKVDKKVEPKSCDKTHTCPPCPAPEAAGGPSVFLFPPKPKDTLMISRTPEVTCVVVDVSHEDPEVKFNWYVDGVEVHNAKTKPREEQYNSTYRVVSVLTVLHQDWLNGKEYKCKVSNKALGAPIEKTISKAKGQPREPQVYTLPPSRDELTKNQVSLTCLVKGFYPSDIAVEWESNGQPENNYKTTPPVLDSDGSFFLYSKLTVDKSRWQQGNVFSCSVMHEALHNHYTQKSLSLSPGK

SEQ ID NO: 167 - DNA, 645 bp, Artificial
  DNA CLC-563 light chain
gagatcgtgctgacccagagccccggcacactctccctgtctcctggggaaagggccaccctttcatgcagagccagccagtccgtctctagtagctacctggcatggtatcagcagaagccaggacaagccccccgcctcctgatttacggcgcttcctctcgggcaactggtatccctgacaggttctcagggagcggaagcggaacagattttaccttgactatttctagactggagccagaggacttcgccgtgtattactgtcagcagtacggtagtagccccctcacctttggccaggggacaaaagtcgaaatcaagcgtacggtggctgcaccatctgtcttcatcttcccgccatctgatgagcagttgaaatctggaactgcctctgttgtgtgcctgctgaataacttctatcccagagaggccaaagtacagtggaaggtggataacgccctccaatcgggtaactcccaggagagtgtcacagagcaggacagcaaggacagcacctacagcctcagcagcaccctgacgctgagcaaagcagactacgagaaacacaaagtctacgcctgcgaagtcacccatcagggcctgagctcgcccgtcacaaagagcttcaacaggggagagtgt

SEQ ID NO: 168 - DNA, 1338 bp, Artificial
  DNA CLC-563 heavy chain
gaggtgcaattgttggagtctgggggaggcttggtacagcctggggggtccctgagactctcctgtgcagcctccggattcacctttagcagttatgccatgagctgggtccgccaggctccagggaaggggctggagtgggtctcagctattagtggtagtggtggtagcacatactacgcagactccgtgaagggccggttcaccatctccagagacaattccaagaacacgctgtatctgcagatgaacagcctgagagccgaggacacggccgtatattactgtgcgcttgacgttggtgctttcgactactggggccaaggagccctggtcaccgtctcgagtgctagcaccaagggcccatcggtcttccccctggcaccctcctccaagagcacctctgggggcacagcggccctgggctgcctggtcaaggactacttccccgaaccggtgacggtgtcgtggaactcaggcgccctgaccagcggcgtgcacaccttcccggctgtcctacagtcctcaggactctactccctcagcagcgtggtgaccgtgccctccagcagcttgggcacccagacctacatctgcaacgtgaatcacaagcccagcaacaccaaggtggacaagaaagttgagcccaaatcttgtgacaaaactcacacatgcccaccgtgcccagcacctgaagctgcagggggaccgtcagtcttcctcttccccccaaaacccaaggacaccctcatgatctcccggacccctgaggtcacatgcgtggtggtggacgtgagccacgaagaccctgaggtcaagttcaactggtacgtggacggcgtggaggtgcataatgccaagacaaagccgcgggaggagcagtacaacagcacgtaccgtgtggtcagcgtcctcaccgtcctgcaccaggactggctgaatggcaaggagtacaagtgcaaggtctccaacaaagccctcggcgcccccatcgagaaaaccatctccaaagccaaagggcagccccgagaaccacaggtgtacaccctgcccccatcccgggatgagctgaccaagaaccaggtcagcctgacctgcctggtcaaaggcttctatcccagcgacatcgccgtggagtgggagagcaatgggcagccggagaacaactacaagaccacgcctcccgtgctggactccgacggctccttcttcctctacagcaagctcaccgtggacaagagcaggtggcagcaggggaacgtcttctcatgctccgtgatgcatgaggctctgcacaaccactacacgcagaagagcctctccctgtctccgggtaaa

SEQ ID NO: 169 - protein, 215 aa, Artificial
  CLC-563 light chain
EIVLTQSPGTLSLSPGERATLSCRASQSVSSSYLAWYQQKPGQAPRLLIYGASSRATGIPDRFSGSGSGTDFTLTISRLEPEDFAVYYCQQYGSSPLTFGQGTKVEIKRTVAAPSVFIFPPSDEQLKSGTASVVCLLNNFYPREAKVQWKVDNALQSGNSQESVTEQDSKDSTYSLSSTLTLSKADYEKHKVYACEVTHQGLSSPVTKSFNRGEC

SEQ ID NO: 170 - protein, 446 aa, Artificial
  CLC-563 heavy chain
EVQLLESGGGLVQPGGSLRLSCAASGFTFSSYAMSWVRQAPGKGLEWVSAISGSGGSTYYADSVKGRFTISRDNSKNTLYLQMNSLRAEDTAVYYCALDVGAFDYWGQGALVTVSSASTKGPSVFPLAPSSKSTSGGTAALGCLVKDYFPEPVTVSWNSGALTSGVHTFPAVLQSSGLYSLSSVVTVPSSSLGTQTYICNVNHKPSNTKVDKKVEPKSCDKTHTCPPCPAPEAAGGPSVFLFPPKPKDTLMISRTPEVTCVVVDVSHEDPEVKFNWYVDGVEVHNAKTKPREEQYNSTYRVVSVLTVLHQDWLNGKEYKCKVSNKALGAPIEKTISKAKGQPREPQVYTLPPSRDELTKNQVSLTCLVKGFYPSDIAVEWESNGQPENNYKTTPPVLDSDGSFFLYSKLTVDKSRWQQGNVFSCSVMHEALHNHYTQKSLSLSPGK

SEQ ID NO: 171 - DNA, 645 bp, Artificial; identical to SEQ ID NO: 167
  DNA CLC-564 light chain

SEQ ID NO: 172 - DNA, 1338 bp, Artificial
  DNA CLC-564 heavy chain
gaggtgcaattgttggagtctgggggaggcttggtacagcctggggggtccctgagactctcctgtgcagcctccggattcacctttagcagttatgccatgagctgggtccgccaggctccagggaaggggctggagtgggtctcagctattagtggtagtggtggtagcacatactacgcagactccgtgaagggccggttcaccatctccagagacaattccaagaacacgctgtatctgcagatgaacagcctgagagccgaggacacggccgtatattactgtgcgttcgacgttggtccgttcgactactggggccaaggaaccctggtcaccgtctcgagtgctagcaccaagggcccatcggtcttccccctggcaccctcctccaagagcacctctgggggcacagcggccctgggctgcctggtcaaggactacttccccgaaccggtgacggtgtcgtggaactcaggcgccctgaccagcggcgtgcacaccttcccggctgtcctacagtcctcaggactctactccctcagcagcgtggtgaccgtgccctccagcagcttgggcacccagacctacatctgcaacgtgaatcacaagcccagcaacaccaaggtggacaagaaagttgagcccaaatcttgtgacaaaactcacacatgcccaccgtgcccagcacctgaagctgcagggggaccgtcagtcttcctcttccccccaaaacccaaggacaccctcatgatctcccggacccctgaggtcacatgcgtggtggtggacgtgagccacgaagaccctgaggtcaagttcaactggtacgtggacggcgtggaggtgcataatgccaagacaaagccgcgggaggagcagtacaacagcacgtaccgtgtggtcagcgtcctcaccgtcctgcaccaggactggctgaatggcaaggagtacaagtgcaaggtctccaacaaagccctcggcgcccccatcgagaaaaccatctccaaagccaaagggcagccccgagaaccacaggtgtacaccctgcccccatcccgggatgagctgaccaagaaccaggtcagcctgacctgcctggtcaaaggcttctatcccagcgacatcgccgtggagtgggagagcaatgggcagccggagaacaactacaagaccacgcctcccgtgctggactccgacggctccttcttcctctacagcaagctcaccgtggacaagagcaggtggcagcaggggaacgtcttctcatgctccgtgatgcatgaggctctgcacaaccactacacgcagaagagcctctccctgtctccgggtaaa

SEQ ID NO: 173 - protein, 215 aa, Artificial; identical to SEQ ID NO: 169
  CLC-564 light chain

SEQ ID NO: 174 - protein, 446 aa, Artificial
  CLC-564 heavy chain
EVQLLESGGGLVQPGGSLRLSCAASGFTFSSYAMSWVRQAPGKGLEWVSAISGSGGSTYYADSVKGRFTISRDNSKNTLYLQMNSLRAEDTAVYYCAFDVGPFDYWGQGTLVTVSSASTKGPSVFPLAPSSKSTSGGTAALGCLVKDYFPEPVTVSWNSGALTSGVHTFPAVLQSSGLYSLSSVVTVPSSSLGTQTYICNVNHKPSNTKVDKKVEPKSCDKTHTCPPCPAPEAAGGPSVFLFPPKPKDTLMISRTPEVTCVVVDVSHEDPEVKFNWYVDGVEVHNAKTKPREEQYNSTYRVVSVLTVLHQDWLNGKEYKCKVSNKALGAPIEKTISKAKGQPREPQVYTLPPSRDELTKNQVSLTCLVKGFYPSDIAVEWESNGQPENNYKTTPPVLDSDGSFFLYSKLTVDKSRWQQGNVFSCSVMHEALHNHYTQKSLSLSPGK

SEQ ID NO: 175 - DNA, 639 bp, Artificial
  DNA 17A9 light chain
tcgtctgagctgactcaggaccctgctgtgtctgtggccttgggacagacagtcaggatcacatgccaaggagacagcctcagaagttattatgcaagctggtaccagcagaagccaggacaggcccctgtacttgtcatctatggtaaaaacaaccggccctcagggatcccagaccgattctctggctccagctcaggaaacacagcttccttgaccatcactggggctcaggcggaagatgaggctgactattactgtaactcccgtgttatgcctcataatcgcgtattcggcggagggaccaagctgaccgtcctaggtcaacccaaggctgcccccagcgtgaccctgttcccccccagcagcgaggaactgcaggccaacaaggccaccctggtctgcctgatcagcgacttctacccaggcgccgtgaccgtggcctggaaggccgacagcagccccgtgaaggccggcgtggagaccaccacccccagcaagcagagcaacaacaagtacgccgccagcagctacctgagcctgacccccgagcagtggaagagccacaggtcctacagctgccaggtgacccacgagggcagcaccgtggagaaaaccgtggcccccaccgagtgcagc

SEQ ID NO: 176 - DNA, 1350 bp, Artificial
  DNA 17A9 heavy chain
gaggtgcaattgttggagtctgggggaggcttggtacagcctggggggtccctgagactctcctgtgcagcctccggattcacctttagcagttatgccatgagctgggtccgccaggctccagggaaggggctggagtgggtctcagctattagtggtagtggtggtagcacatactacgcagactccgtgaagggccggttcaccatctccagagacaattccaagaacacgctgtatctgcagatgaacagcctgagagccgaggacacggccgtatattactgtgcgcgtgttttctaccgtggtggtgtttctatggactactggggccaaggaaccctggtcaccgtctcgagtgctagcaccaagggcccatcggtcttccccctggcaccctcctccaagagcacctctgggggcacagcggccctgggctgcctggtcaaggactacttccccgaaccggtgacggtgtcgtggaactcaggcgccctgaccagcggcgtgcacaccttcccggctgtcctacagtcctcaggactctactccctcagcagcgtggtgaccgtgccctccagcagcttgggcacccagacctacatctgcaacgtgaatcacaagcccagcaacaccaaggtggacaagaaagttgagcccaaatcttgtgacaaaactcacacatgcccaccgtgcccagcacctgaagctgcagggggaccgtcagtcttcctcttccccccaaaacccaaggacaccctcatgatctcccggacccctgaggtcacatgcgtggtggtggacgtgagccacgaagaccctgaggtcaagttcaactggtacgtggacggcgtggaggtgcataatgccaagacaaagccgcgggaggagcagtacaacagcacgtaccgtgtggtcagcgtcctcaccgtcctgcaccaggactggctgaatggcaaggagtacaagtgcaaggtctccaacaaagccctcggcgcccccatcgagaaaaccatctccaaagccaaagggcagccccgagaaccacaggtgtacaccctgcccccatcccgggatgagctgaccaagaaccaggtcagcctgacctgcctggtcaaaggcttctatcccagcgacatcgccgtggagtgggagagcaatgggcagccggagaacaactacaagaccacgcctcccgtgctggactccgacggctccttcttcctctacagcaagctcaccgtggacaagagcaggtggcagcaggggaacgtcttctcatgctccgtgatgcatgaggctctgcacaaccactacacgcagaagagcctctccctgtctccgggtaaa

SEQ ID NO: 177 - protein, 213 aa, Artificial
  17A9 light chain
SSELTQDPAVSVALGQTVRITCQGDSLRSYYASWYQQKPGQAPVLVIYGKNNRPSGIPDRFSGSSSGNTASLTITGAQAEDEADYYCNSRVMPHNRVFGGGTKLTVLGQPKAAPSVTLFPPSSEELQANKATLVCLISDFYPGAVTVAWKADSSPVKAGVETTTPSKQSNNKYAASSYLSLTPEQWKSHRSYSCQVTHEGSTVEKTVAPTECS

SEQ ID NO: 178 - protein, 450 aa, Artificial
  17A9 heavy chain
EVQLLESGGGLVQPGGSLRLSCAASGFTFSSYAMSWVRQAPGKGLEWVSAISGSGGSTYYADSVKGRFTISRDNSKNTLYLQMNSLRAEDTAVYYCARVFYRGGVSMDYWGQGTLVTVSSASTKGPSVFPLAPSSKSTSGGTAALGCLVKDYFPEPVTVSWNSGALTSGVHTFPAVLQSSGLYSLSSVVTVPSSSLGTQTYICNVNHKPSNTKVDKKVEPKSCDKTHTCPPCPAPEAAGGPSVFLFPPKPKDTLMISRTPEVTCVVVDVSHEDPEVKFNWYVDGVEVHNAKTKPREEQYNSTYRVVSVLTVLHQDWLNGKEYKCKVSNKALGAPIEKTISKAKGQPREPQVYTLPPSRDELTKNQVSLTCLVKGFYPSDIAVEWESNGQPENNYKTTPPVLDSDGSFFLYSKLTVDKSRWQQGNVFSCSVMHEALHNHYTQKSLSLSPGK

SEQ ID NO: 179 - protein, 221 aa, Artificial
  human OX40 His-tagged
LHCVGDTYPSNDRCCHECRPGNGMVSRCSRSQNTVCRPCGPGFYNDVVSSKPCKPCTWCNLRSGSERKQLCTATQDTVCRCRAGTQPLDSYKPGVDCAPCPPGHFSPGDNQACKPWTNCTLAGKHTLQPASNSSDAICEDRDPPATQPQETQGPPARPITVQPTEAWPRTSQGPSTRPVEVPGGRAVDEQLYFQGGSGLNDIFEAQKIEWHEARAHHHHHH

SEQ ID NO: 180 - protein, 226 aa, Artificial
  murine OX40 His-tagged
TARRLNCVKHTYPSGHKCCRECQPGHGMVSRCDHTRDTLCHPCETGFYNEAVNYDTCKQCTQCNHRSGSELKQNCTPTQDTVCRCRPGTQPRQDSGYKLGVDCVPCPPGHFSPGNNQACKPWTNCTLSGKQTRHPASDSLDAVCEDRSLLATLLWETQRPTFRPTTVQSTTVWPRTSELPSPPTLVTPEGPVDEQLYFQGGSGLNDIFEAQKIEWHEARAHHHHHH

SEQ ID NO: 181 - DNA, 1317 bp, Artificial
  DNA dimeric human OX40 antigen Fc
ctgcactgcgtgggcgacacctaccccagcaacgaccggtgctgccacgagtgcagacccggcaacggcatggtgtcccggtgcagccggtcccagaacaccgtgtgcagaccttgcggccctggcttctacaacgacgtggtgtccagcaagccctgcaagccttgtacctggtgcaacctgcggagcggcagcgagcggaagcagctgtgtaccgccacccaggataccgtgtgccggtgtagagccggcacccagcccctggacagctacaaacccggcgtggactgcgccccttgccctcctggccacttcagccctggcgacaaccaggcctgcaagccttggaccaactgcaccctggccggcaagcacaccctgcagcccgccagcaatagcagcgacgccatctgcgaggaccgggatcctcctgccacccagcctcaggaaacccagggccctcccgccagacccatcaccgtgcagcctacagaggcctggcccagaaccagccaggggcctagcaccagacccgtggaagtgcctggcggcagagccgtcgacgaacagttatattttcagggcggctcacccaaatctgcagacaaaactcacacatgcccaccgtgcccagcacctgaactcctggggggaccgtcagtcttcctcttccccccaaaacccaaggacaccctcatgatctcccggacccctgaggtcacatgcgtggtggtggacgtgagccacgaagaccctgaggtcaagttcaactggtacgtggacggcgtggaggtgcataatgccaagacaaagccgcgggaggagcagtacaacagcacgtaccgtgtggtcagcgtcctcaccgtcctgcaccaggactggctgaatggcaaggagtacaagtgcaaggtctccaacaaagccctcggcgcccccatcgagaaaaccatctccaaagccaaagggcagccccgagaaccacaggtgtacaccctgcccccatcccgggatgagctgaccaagaaccaggtcagcctgacctgcctggtcaaaggcttctatcccagcgacatcgccgtggagtgggagagcaatgggcagccggagaacaactacaagaccacgcctcccgtgctggactccgacggctccttcttcctctacagcaagctcaccgtggacaagagcaggtggcagcaggggaacgtcttctcatgctccgtgatgcatgaggctctgcacaaccactacacgcagaagagcctctccctgtctccgggtaaatccggctacccatacgatgttccagattacgct

SEQ ID NO: 182 - protein, 439 aa, Artificial
  dimeric human OX40 antigen Fc
LHCVGDTYPSNDRCCHECRPGNGMVSRCSRSQNTVCRPCGPGFYNDVVSSKPCKPCTWCNLRSGSERKQLCTATQDTVCRCRAGTQPLDSYKPGVDCAPCPPGHFSPGDNQACKPWTNCTLAGKHTLQPASNSSDAICEDRDPPATQPQETQGPPARPITVQPTEAWPRTSQGPSTRPVEVPGGRAVDEQLYFQGGSPKSADKTHTCPPCPAPELLGGPSVFLFPPKPKDTLMISRTPEVTCVVVDVSHEDPEVKFNWYVDGVEVHNAKTKPREEQYNSTYRVVSVLTVLHQDWLNGKEYKCKVSNKALGAPIEKTISKAKGQPREPQVYTLPPSRDELTKNQVSLTCLVKGFYPSDIAVEWESNGQPENNYKTTPPVLDSDGSFFLYSKLTVDKSRWQQGNVFSCSVMHEALHNHYTQKSLSLSPGKSGYPYDVPDYA

SEQ ID NO: 183 - DNA, 2064 bp, Artificial
  (8H9) VHCH1-Heavy chain-(28H1) VHCL  DNA
caggtgcaattggtgcagtctggggctgaggtgaagaagcctgggtcctcggtgaaggtctcctgcaaggcctccggaggcacattcagcagctacgctataagctgggtgcgacaggcccctggacaagggctcgagtggatgggagggatcatccctatctttggtacagcaaactacgcacagaagttccagggcagggtcaccattactgcagacaaatccacgagcacagcctacatggagctgagcagcctgagatctgaggacaccgccgtgtattactgtgcgagagaatacggttggatggactactggggccaagggaccaccgtgaccgtctcctcagctagcaccaagggcccatccgtgttccctctggccccttccagcaagtctacctctggcggcacagccgctctgggctgcctcgtgaaggactacttccccgagcctgtgacagtgtcctggaactctggcgccctgacatccggcgtgcacacctttccagctgtgctgcagtcctccggcctgtactccctgtcctccgtcgtgacagtgccctccagctctctgggcacccagacctacatctgcaacgtgaaccacaagccctccaacaccaaggtggacaagaaggtggaacccaagtcctgcgacaagacccacacctgtcccccttgtcctgcccctgaagctgctggcggccctagcgtgttcctgttccccccaaagcccaaggacaccctgatgatctcccggacccccgaagtgacctgcgtggtggtggatgtgtcccacgaggaccctgaagtgaagttcaattggtacgtggacggcgtggaagtgcacaatgccaagaccaagcctagagaggaacagtacaactccacctaccgggtggtgtccgtgctgaccgtgctgcaccaggattggctgaacggcaaagagtacaagtgcaaggtgtccaacaaggccctgggagcccccatcgaaaagaccatctccaaggccaagggccagcctcgcgagcctcaggtgtacaccctgccccctagcagagatgagctgaccaagaaccaggtgtccctgacctgtctcgtgaaaggcttctacccctccgatatcgccgtggaatgggagagcaacggccagcccgagaacaactacaagaccaccccccctgtgctggactccgacggctcattcttcctgtactctaagctgacagtggacaagtcccggtggcagcagggcaacgtgttctcctgctccgtgatgcacgaggccctgcacaaccactacacccagaagtccctgtccctgtctcccgggggaggcggaggatctggcggaggcggatccggtggtggcggatctgggggcggtggatctgaggtgcagctgctggaatctgggggaggactggtgcagccaggcggatctctgaggctgtcctgcgctgcttccggctttaccttctccagccacgccatgagttgggtgcgccaggcacccggaaaaggactggaatgggtgtcagccatctgggcctccggcgagcagtactacgccgatagcgtgaagggccggttcaccatctctcgggataacagcaagaatactctgtacctgcagatgaactccctgcgcgctgaagataccgctgtgtattactgcgccaagggctggctgggcaacttcgattactggggccagggaaccctcgtgactgtctcgagcgcttctgtggccgctccctccgtgttcatcttcccaccttccgacgagcagctgaagtccggcactgcctctgtcgtgtgcctgctgaacaacttctaccctcgggaagccaaggtgcagtggaaagtggataacgccctgcagtccggcaactcccaggaatccgtgaccgagcaggactccaaggacagcacctactccctgagcagcaccctgaccctgtccaaggccgactacgagaagcacaaggtgtacgcctgtgaagtgacccaccagggcctgtccagccccgtgaccaagtccttcaaccggggcgagtgc

SEQ ID NO: 184 - DNA, 642 bp, Artificial
  VLCH1-Light chain 2 (28H1) DNA
gagatcgtgctgacccagtctcccggcaccctgagcctgagccctggcgagagagccaccctgagctgcagagccagccagagcgtgagccggagctacctggcctggtatcagcagaagcccggccaggcccccagactgctgatcatcggcgccagcacccgggccaccggcatccccgatagattcagcggcagcggctccggcaccgacttcaccctgaccatcagccggctggaacccgaggacttcgccgtgtactactgccagcagggccaggtgatcccccccaccttcggccagggcaccaaggtggaaatcaagagctccgctagcaccaagggcccctccgtgtttcctctggcccccagcagcaagagcacctctggcggaacagccgccctgggctgcctggtgaaagactacttccccgagcccgtgaccgtgtcctggaactctggcgccctgaccagcggcgtgcacacctttccagccgtgctgcagagcagcggcctgtactccctgagcagcgtggtgacagtgccctccagcagcctgggcacccagacctacatctgcaacgtgaaccacaagcccagcaacaccaaagtggacaagaaggtggaacccaagagctgcgac

SEQ ID NO: 185 - protein, 688 aa, Artificial
  (8H9) VHCH1-Heavy chain-(28H1) VHCL
QVQLVQSGAEVKKPGSSVKVSCKASGGTFSSYAISWVRQAPGQGLEWMGGIIPIFGTANYAQKFQGRVTITADKSTSTAYMELSSLRSEDTAVYYCAREYGWMDYWGQGTTVTVSSASTKGPSVFPLAPSSKSTSGGTAALGCLVKDYFPEPVTVSWNSGALTSGVHTFPAVLQSSGLYSLSSVVTVPSSSLGTQTYICNVNHKPSNTKVDKKVEPKSCDKTHTCPPCPAPEAAGGPSVFLFPPKPKDTLMISRTPEVTCVVVDVSHEDPEVKFNWYVDGVEVHNAKTKPREEQYNSTYRVVSVLTVLHQDWLNGKEYKCKVSNKALGAPIEKTISKAKGQPREPQVYTLPPSRDELTKNQVSLTCLVKGFYPSDIAVEWESNGQPENNYKTTPPVLDSDGSFFLYSKLTVDKSRWQQGNVFSCSVMHEALHNHYTQKSLSLSPGGGGGSGGGGSGGGGSGGGGSEVQLLESGGGLVQPGGSLRLSCAASGFTFSSHAMSWVRQAPGKGLEWVSAIWASGEQYYADSVKGRFTISRDNSKNTLYLQMNSLRAEDTAVYYCAKGWLGNFDYWGQGTLVTVSSASVAAPSVFIFPPSDEQLKSGTASVVCLLNNFYPREAKVQWKVDNALQSGNSQESVTEQDSKDSTYSLSSTLTLSKADYEKHKVYACEVTHQGLSSPVTKSFNRGEC

SEQ ID NO: 186 - protein, 214 aa, Artificial
  VLCH1-Light chain 2 (28H1)
EIVLTQSPGTLSLSPGERATLSCRASQSVSRSYLAWYQQKPGQAPRLLIIGASTRATGIPDRFSGSGSGTDFTLTISRLEPEDFAVYYCQQGQVIPPTFGQGTKVEIKSSASTKGPSVFPLAPSSKSTSGGTAALGCLVKDYFPEPVTVSWNSGALTSGVHTFPAVLQSSGLYSLSSVVTVPSSSLGTQTYICNVNHKPSNTKVDKKVEPKSCD

SEQ ID NO: 187 - DNA, 2070 bp, Artificial
  (49B4) VHCH1-Heavy chain-(28H1) VHCL DNA
caggtgcaattggtgcagtctggggctgaggtgaagaagcctgggtcctcggtgaaggtctcctgcaaggcctccggaggcacattcagcagctacgctataagctgggtgcgacaggcccctggacaagggctcgagtggatgggagggatcatccctatctttggtacagcaaactacgcacagaagttccagggcagggtcaccattactgcagacaaatccacgagcacagcctacatggagctgagcagcctgagatctgaggacaccgccgtgtattactgtgcgagagaatactaccgtggtccgtacgactactggggccaagggaccaccgtgaccgtctcctcagctagcaccaagggcccatccgtgttccctctggccccttccagcaagtctacctctggcggcacagccgctctgggctgcctcgtgaaggactacttccccgagcctgtgacagtgtcctggaactctggcgccctgacatccggcgtgcacacctttccagctgtgctgcagtcctccggcctgtactccctgtcctccgtcgtgacagtgccctccagctctctgggcacccagacctacatctgcaacgtgaaccacaagccctccaacaccaaggtggacaagaaggtggaacccaagtcctgcgacaagacccacacctgtcccccttgtcctgcccctgaagctgctggcggccctagcgtgttcctgttccccccaaagcccaaggacaccctgatgatctcccggacccccgaagtgacctgcgtggtggtggatgtgtcccacgaggaccctgaagtgaagttcaattggtacgtggacggcgtggaagtgcacaatgccaagaccaagcctagagaggaacagtacaactccacctaccgggtggtgtccgtgctgaccgtgctgcaccaggattggctgaacggcaaagagtacaagtgcaaggtgtccaacaaggccctgggagcccccatcgaaaagaccatctccaaggccaagggccagcctcgcgagcctcaggtgtacaccctgccccctagcagagatgagctgaccaagaaccaggtgtccctgacctgtctcgtgaaaggcttctacccctccgatatcgccgtggaatgggagagcaacggccagcccgagaacaactacaagaccaccccccctgtgctggactccgacggctcattcttcctgtactctaagctgacagtggacaagtcccggtggcagcagggcaacgtgttctcctgctccgtgatgcacgaggccctgcacaaccactacacccagaagtccctgtccctgtctcccgggggaggcggaggatctggcggaggcggatccggtggtggcggatctgggggcggtggatctgaggtgcagctgctggaatctgggggaggactggtgcagccaggcggatctctgaggctgtcctgcgctgcttccggctttaccttctccagccacgccatgagttgggtgcgccaggcacccggaaaaggactggaatgggtgtcagccatctgggcctccggcgagcagtactacgccgatagcgtgaagggccggttcaccatctctcgggataacagcaagaatactctgtacctgcagatgaactccctgcgcgctgaagataccgctgtgtattactgcgccaagggctggctgggcaacttcgattactggggccagggaaccctcgtgactgtctcgagcgcttctgtggccgctccctccgtgttcatcttcccaccttccgacgagcagctgaagtccggcactgcctctgtcgtgtgcctgctgaacaacttctaccctcgggaagccaaggtgcagtggaaagtggataacgccctgcagtccggcaactcccaggaatccgtgaccgagcaggactccaaggacagcacctactccctgagcagcaccctgaccctgtccaaggccgactacgagaagcacaaggtgtacgcctgtgaagtgacccaccagggcctgtccagccccgtgaccaagtccttcaaccggggcgagtgc

SEQ ID NO: 188 - protein, 690 aa, Artificial
  (49B4) VHCH1-Heavy chain-(28H1) VHCL
QVQLVQSGAEVKKPGSSVKVSCKASGGTFSSYAISWVRQAPGQGLEWMGGIIPIFGTANYAQKFQGRVTITADKSTSTAYMELSSLRSEDTAVYYCAREYYRGPYDYWGQGTTVTVSSASTKGPSVFPLAPSSKSTSGGTAALGCLVKDYFPEPVTVSWNSGALTSGVHTFPAVLQSSGLYSLSSVVTVPSSSLGTQTYICNVNHKPSNTKVDKKVEPKSCDKTHTCPPCPAPEAAGGPSVFLFPPKPKDTLMISRTPEVTCVVVDVSHEDPEVKFNWYVDGVEVHNAKTKPREEQYNSTYRVVSVLTVLHQDWLNGKEYKCKVSNKALGAPIEKTISKAKGQPREPQVYTLPPSRDELTKNQVSLTCLVKGFYPSDIAVEWESNGQPENNYKTTPPVLDSDGSFFLYSKLTVDKSRWQQGNVFSCSVMHEALHNHYTQKSLSLSPGGGGGSGGGGSGGGGSGGGGSEVQLLESGGGLVQPGGSLRLSCAASGFTFSSHAMSWVRQAPGKGLEWVSAIWASGEQYYADSVKGRFTISRDNSKNTLYLQMNSLRAEDTAVYYCAKGWLGNFDYWGQGTLVTVSSASVAAPSVFIFPPSDEQLKSGTASVVCLLNNFYPREAKVQWKVDNALQSGNSQESVTEQDSKDSTYSLSSTLTLSKADYEKHKVYACEVTHQGLSSPVTKSFNRGEC

SEQ ID NO: 189 - DNA, 2064 bp, Artificial
  (1G4) VHCH1-Heavy chain-(28H1) VHCL DNA
caggtgcaattggtgcagtctggggctgaggtgaagaagcctgggtcctcggtgaaggtctcctgcaaggcctccggaggcacattcagcagctacgctataagctgggtgcgacaggcccctggacaagggctcgagtggatgggagggatcatccctatctttggtacagcaaactacgcacagaagttccagggcagggtcaccattactgcagacaaatccacgagcacagcctacatggagctgagcagcctgagatctgaggacaccgccgtgtattactgtgcgagagaatacggttctatggactactggggccaagggaccaccgtgaccgtctcctcagctagcaccaagggcccatccgtgttccctctggccccttccagcaagtctacctctggcggcacagccgctctgggctgcctcgtgaaggactacttccccgagcctgtgacagtgtcctggaactctggcgccctgacatccggcgtgcacacctttccagctgtgctgcagtcctccggcctgtactccctgtcctccgtcgtgacagtgccctccagctctctgggcacccagacctacatctgcaacgtgaaccacaagccctccaacaccaaggtggacaagaaggtggaacccaagtcctgcgacaagacccacacctgtcccccttgtcctgcccctgaagctgctggcggccctagcgtgttcctgttccccccaaagcccaaggacaccctgatgatctcccggacccccgaagtgacctgcgtggtggtggatgtgtcccacgaggaccctgaagtgaagttcaattggtacgtggacggcgtggaagtgcacaatgccaagaccaagcctagagaggaacagtacaactccacctaccgggtggtgtccgtgctgaccgtgctgcaccaggattggctgaacggcaaagagtacaagtgcaaggtgtccaacaaggccctgggagcccccatcgaaaagaccatctccaaggccaagggccagcctcgcgagcctcaggtgtacaccctgccccctagcagagatgagctgaccaagaaccaggtgtccctgacctgtctcgtgaaaggcttctacccctccgatatcgccgtggaatgggagagcaacggccagcccgagaacaactacaagaccaccccccctgtgctggactccgacggctcattcttcctgtactctaagctgacagtggacaagtcccggtggcagcagggcaacgtgttctcctgctccgtgatgcacgaggccctgcacaaccactacacccagaagtccctgtccctgtctcccgggggaggcggaggatctggcggaggcggatccggtggtggcggatctgggggcggtggatctgaggtgcagctgctggaatctgggggaggactggtgcagccaggcggatctctgaggctgtcctgcgctgcttccggctttaccttctccagccacgccatgagttgggtgcgccaggcacccggaaaaggactggaatgggtgtcagccatctgggcctccggcgagcagtactacgccgatagcgtgaagggccggttcaccatctctcgggataacagcaagaatactctgtacctgcagatgaactccctgcgcgctgaagataccgctgtgtattactgcgccaagggctggctgggcaacttcgattactggggccagggaaccctcgtgactgtctcgagcgcttctgtggccgctccctccgtgttcatcttcccaccttccgacgagcagctgaagtccggcactgcctctgtcgtgtgcctgctgaacaacttctaccctcgggaagccaaggtgcagtggaaagtggataacgccctgcagtccggcaactcccaggaatccgtgaccgagcaggactccaaggacagcacctactccctgagcagcaccctgaccctgtccaaggccgactacgagaagcacaaggtgtacgcctgtgaagtgacccaccagggcctgtccagccccgtgaccaagtccttcaaccggggcgagtgc

SEQ ID NO: 190 - protein, 688 aa, Artificial
  (1G4) VHCH1-Heavy chain-(28H1) VHCL
QVQLVQSGAEVKKPGSSVKVSCKASGGTFSSYAISWVRQAPGQGLEWMGGIIPIFGTANYAQKFQGRVTITADKSTSTAYMELSSLRSEDTAVYYCAREYGSMDYWGQGTTVTVSSASTKGPSVFPLAPSSKSTSGGTAALGCLVKDYFPEPVTVSWNSGALTSGVHTFPAVLQSSGLYSLSSVVTVPSSSLGTQTYICNVNHKPSNTKVDKKVEPKSCDKTHTCPPCPAPEAAGGPSVFLFPPKPKDTLMISRTPEVTCVVVDVSHEDPEVKFNWYVDGVEVHNAKTKPREEQYNSTYRVVSVLTVLHQDWLNGKEYKCKVSNKALGAPIEKTISKAKGQPREPQVYTLPPSRDELTKNQVSLTCLVKGFYPSDIAVEWESNGQPENNYKTTPPVLDSDGSFFLYSKLTVDKSRWQQGNVFSCSVMHEALHNHYTQKSLSLSPGGGGGSGGGGSGGGGSGGGGSEVQLLESGGGLVQPGGSLRLSCAASGFTFSSHAMSWVRQAPGKGLEWVSAIWASGEQYYADSVKGRFTISRDNSKNTLYLQMNSLRAEDTAVYYCAKGWLGNFDYWGQGTLVTVSSASVAAPSVFIFPPSDEQLKSGTASVVCLLNNFYPREAKVQWKVDNALQSGNSQESVTEQDSKDSTYSLSSTLTLSKADYEKHKVYACEVTHQGLSSPVTKSFNRGEC

SEQ ID NO: 191 - DNA, 2082 bp, Artificial
  (20B7) VHCH1-Heavy chain-(28H1) VHCL DNA
caggtgcaattggtgcagtctggggctgaggtgaagaagcctgggtcctcggtgaaggtctcctgcaaggcctccggaggcacattcagcagctacgctataagctgggtgcgacaggcccctggacaagggctcgagtggatgggagggatcatccctatctttggtacagcaaactacgcacagaagttccagggcagggtcaccattactgcagacaaatccacgagcacagcctacatggagctgagcagcctgagatctgaggacaccgccgtgtattactgtgcgagagttaactacccgtactcttactggggtgacttcgactactggggccaagggaccaccgtgaccgtctcctcagctagcaccaagggcccatccgtgttccctctggccccttccagcaagtctacctctggcggcacagccgctctgggctgcctcgtgaaggactacttccccgagcctgtgacagtgtcctggaactctggcgccctgacatccggcgtgcacacctttccagctgtgctgcagtcctccggcctgtactccctgtcctccgtcgtgacagtgccctccagctctctgggcacccagacctacatctgcaacgtgaaccacaagccctccaacaccaaggtggacaagaaggtggaacccaagtcctgcgacaagacccacacctgtcccccttgtcctgcccctgaagctgctggcggccctagcgtgttcctgttccccccaaagcccaaggacaccctgatgatctcccggacccccgaagtgacctgcgtggtggtggatgtgtcccacgaggaccctgaagtgaagttcaattggtacgtggacggcgtggaagtgcacaatgccaagaccaagcctagagaggaacagtacaactccacctaccgggtggtgtccgtgctgaccgtgctgcaccaggattggctgaacggcaaagagtacaagtgcaaggtgtccaacaaggccctgggagcccccatcgaaaagaccatctccaaggccaagggccagcctcgcgagcctcaggtgtacaccctgccccctagcagagatgagctgaccaagaaccaggtgtccctgacctgtctcgtgaaaggcttctacccctccgatatcgccgtggaatgggagagcaacggccagcccgagaacaactacaagaccaccccccctgtgctggactccgacggctcattcttcctgtactctaagctgacagtggacaagtcccggtggcagcagggcaacgtgttctcctgctccgtgatgcacgaggccctgcacaaccactacacccagaagtccctgtccctgtctcccgggggaggcggaggatctggcggaggcggatccggtggtggcggatctgggggcggtggatctgaggtgcagctgctggaatctgggggaggactggtgcagccaggcggatctctgaggctgtcctgcgctgcttccggctttaccttctccagccacgccatgagttgggtgcgccaggcacccggaaaaggactggaatgggtgtcagccatctgggcctccggcgagcagtactacgccgatagcgtgaagggccggttcaccatctctcgggataacagcaagaatactctgtacctgcagatgaactccctgcgcgctgaagataccgctgtgtattactgcgccaagggctggctgggcaacttcgattactggggccagggaaccctcgtgactgtctcgagcgcttctgtggccgctccctccgtgttcatcttcccaccttccgacgagcagctgaagtccggcactgcctctgtcgtgtgcctgctgaacaacttctaccctcgggaagccaaggtgcagtggaaagtggataacgccctgcagtccggcaactcccaggaatccgtgaccgagcaggactccaaggacagcacctactccctgagcagcaccctgaccctgtccaaggccgactacgagaagcacaaggtgtacgcctgtgaagtgacccaccagggcctgtccagccccgtgaccaagtccttcaaccggggcgagtgc

SEQ ID NO: 192 - protein, 694 aa, Artificial
  (20B7) VHCH1-Heavy chain-(28H1) VHCL
QVQLVQSGAEVKKPGSSVKVSCKASGGTFSSYAISWVRQAPGQGLEWMGGIIPIFGTANYAQKFQGRVTITADKSTSTAYMELSSLRSEDTAVYYCARVNYPYSYWGDFDYWGQGTTVTVSSASTKGPSVFPLAPSSKSTSGGTAALGCLVKDYFPEPVTVSWNSGALTSGVHTFPAVLQSSGLYSLSSVVTVPSSSLGTQTYICNVNHKPSNTKVDKKVEPKSCDKTHTCPPCPAPEAAGGPSVFLFPPKPKDTLMISRTPEVTCVVVDVSHEDPEVKFNWYVDGVEVHNAKTKPREEQYNSTYRVVSVLTVLHQDWLNGKEYKCKVSNKALGAPIEKTISKAKGQPREPQVYTLPPSRDELTKNQVSLTCLVKGFYPSDIAVEWESNGQPENNYKTTPPVLDSDGSFFLYSKLTVDKSRWQQGNVFSCSVMHEALHNHYTQKSLSLSPGGGGGSGGGGSGGGGSGGGGSEVQLLESGGGLVQPGGSLRLSCAASGFTFSSHAMSWVRQAPGKGLEWVSAIWASGEQYYADSVKGRFTISRDNSKNTLYLQMNSLRAEDTAVYYCAKGWLGNFDYWGQGTLVTVSSASVAAPSVFIFPPSDEQLKSGTASVVCLLNNFYPREAKVQWKVDNALQSGNSQESVTEQDSKDSTYSLSSTLTLSKADYEKHKVYACEVTHQGLSSPVTKSFNRGEC

SEQ ID NO: 193 - DNA, 2064 bp, Artificial
  (CLC-563) VHCH1-Heavy chain-(28H1) VHCL  DNA
gaggtgcaattgttggagtctgggggaggcttggtacagcctggggggtccctgagactctcctgtgcagcctccggattcacctttagcagttatgccatgagctgggtccgccaggctccagggaaggggctggagtgggtctcagctattagtggtagtggtggtagcacatactacgcagactccgtgaagggccggttcaccatctccagagacaattccaagaacacgctgtatctgcagatgaacagcctgagagccgaggacacggccgtatattactgtgcgcttgacgttggtgctttcgactactggggccaaggagccctggtcaccgtctcgagtgctagcaccaagggcccatccgtgttccctctggccccttccagcaagtctacctctggcggcacagccgctctgggctgcctcgtgaaggactacttccccgagcctgtgacagtgtcctggaactctggcgccctgacatccggcgtgcacacctttccagctgtgctgcagtcctccggcctgtactccctgtcctccgtcgtgacagtgccctccagctctctgggcacccagacctacatctgcaacgtgaaccacaagccctccaacaccaaggtggacaagaaggtggaacccaagtcctgcgacaagacccacacctgtcccccttgtcctgcccctgaagctgctggcggccctagcgtgttcctgttccccccaaagcccaaggacaccctgatgatctcccggacccccgaagtgacctgcgtggtggtggatgtgtcccacgaggaccctgaagtgaagttcaattggtacgtggacggcgtggaagtgcacaatgccaagaccaagcctagagaggaacagtacaactccacctaccgggtggtgtccgtgctgaccgtgctgcaccaggattggctgaacggcaaagagtacaagtgcaaggtgtccaacaaggccctgggagcccccatcgaaaagaccatctccaaggccaagggccagcctcgcgagcctcaggtgtacaccctgccccctagcagagatgagctgaccaagaaccaggtgtccctgacctgtctcgtgaaaggcttctacccctccgatatcgccgtggaatgggagagcaacggccagcccgagaacaactacaagaccaccccccctgtgctggactccgacggctcattcttcctgtactctaagctgacagtggacaagtcccggtggcagcagggcaacgtgttctcctgctccgtgatgcacgaggccctgcacaaccactacacccagaagtccctgtccctgtctcccgggggaggcggaggatctggcggaggcggatccggtggtggcggatctgggggcggtggatctgaggtgcagctgctggaatctgggggaggactggtgcagccaggcggatctctgaggctgtcctgcgctgcttccggctttaccttctccagccacgccatgagttgggtgcgccaggcacccggaaaaggactggaatgggtgtcagccatctgggcctccggcgagcagtactacgccgatagcgtgaagggccggttcaccatctctcgggataacagcaagaatactctgtacctgcagatgaactccctgcgcgctgaagataccgctgtgtattactgcgccaagggctggctgggcaacttcgattactggggccagggaaccctcgtgactgtctcgagcgcttctgtggccgctccctccgtgttcatcttcccaccttccgacgagcagctgaagtccggcactgcctctgtcgtgtgcctgctgaacaacttctaccctcgggaagccaaggtgcagtggaaagtggataacgccctgcagtccggcaactcccaggaatccgtgaccgagcaggactccaaggacagcacctactccctgagcagcaccctgaccctgtccaaggccgactacgagaagcacaaggtgtacgcctgtgaagtgacccaccagggcctgtccagccccgtgaccaagtccttcaaccggggcgagtgc

SEQ ID NO: 194 - protein, 688 aa, Artificial
  (CLC-563) VHCH1-Heavy chain-(28H1) VHCL
EVQLLESGGGLVQPGGSLRLSCAASGFTFSSYAMSWVRQAPGKGLEWVSAISGSGGSTYYADSVKGRFTISRDNSKNTLYLQMNSLRAEDTAVYYCALDVGAFDYWGQGALVTVSSASTKGPSVFPLAPSSKSTSGGTAALGCLVKDYFPEPVTVSWNSGALTSGVHTFPAVLQSSGLYSLSSVVTVPSSSLGTQTYICNVNHKPSNTKVDKKVEPKSCDKTHTCPPCPAPEAAGGPSVFLFPPKPKDTLMISRTPEVTCVVVDVSHEDPEVKFNWYVDGVEVHNAKTKPREEQYNSTYRVVSVLTVLHQDWLNGKEYKCKVSNKALGAPIEKTISKAKGQPREPQVYTLPPSRDELTKNQVSLTCLVKGFYPSDIAVEWESNGQPENNYKTTPPVLDSDGSFFLYSKLTVDKSRWQQGNVFSCSVMHEALHNHYTQKSLSLSPGGGGGSGGGGSGGGGSGGGGSEVQLLESGGGLVQPGGSLRLSCAASGFTFSSHAMSWVRQAPGKGLEWVSAIWASGEQYYADSVKGRFTISRDNSKNTLYLQMNSLRAEDTAVYYCAKGWLGNFDYWGQGTLVTVSSASVAAPSVFIFPPSDEQLKSGTASVVCLLNNFYPREAKVQWKVDNALQSGNSQESVTEQDSKDSTYSLSSTLTLSKADYEKHKVYACEVTHQGLSSPVTKSFNRGEC

SEQ ID NO: 195 - DNA, 2064 bp, Artificial
  (CLC-564) VHCH1-Heavy chain-(28H1) VHCL  DNA
gaggtgcaattgttggagtctgggggaggcttggtacagcctggggggtccctgagactctcctgtgcagcctccggattcacctttagcagttatgccatgagctgggtccgccaggctccagggaaggggctggagtgggtctcagctattagtggtagtggtggtagcacatactacgcagactccgtgaagggccggttcaccatctccagagacaattccaagaacacgctgtatctgcagatgaacagcctgagagccgaggacacggccgtatattactgtgcgttcgacgttggtccgttcgactactggggccaaggaaccctggtcaccgtctcgagtgctagcaccaagggcccatccgtgttccctctggccccttccagcaagtctacctctggcggcacagccgctctgggctgcctcgtgaaggactacttccccgagcctgtgacagtgtcctggaactctggcgccctgacatccggcgtgcacacctttccagctgtgctgcagtcctccggcctgtactccctgtcctccgtcgtgacagtgccctccagctctctgggcacccagacctacatctgcaacgtgaaccacaagccctccaacaccaaggtggacaagaaggtggaacccaagtcctgcgacaagacccacacctgtcccccttgtcctgcccctgaagctgctggcggccctagcgtgttcctgttccccccaaagcccaaggacaccctgatgatctcccggacccccgaagtgacctgcgtggtggtggatgtgtcccacgaggaccctgaagtgaagttcaattggtacgtggacggcgtggaagtgcacaatgccaagaccaagcctagagaggaacagtacaactccacctaccgggtggtgtccgtgctgaccgtgctgcaccaggattggctgaacggcaaagagtacaagtgcaaggtgtccaacaaggccctgggagcccccatcgaaaagaccatctccaaggccaagggccagcctcgcgagcctcaggtgtacaccctgccccctagcagagatgagctgaccaagaaccaggtgtccctgacctgtctcgtgaaaggcttctacccctccgatatcgccgtggaatgggagagcaacggccagcccgagaacaactacaagaccaccccccctgtgctggactccgacggctcattcttcctgtactctaagctgacagtggacaagtcccggtggcagcagggcaacgtgttctcctgctccgtgatgcacgaggccctgcacaaccactacacccagaagtccctgtccctgtctcccgggggaggcggaggatctggcggaggcggatccggtggtggcggatctgggggcggtggatctgaggtgcagctgctggaatctgggggaggactggtgcagccaggcggatctctgaggctgtcctgcgctgcttccggctttaccttctccagccacgccatgagttgggtgcgccaggcacccggaaaaggactggaatgggtgtcagccatctgggcctccggcgagcagtactacgccgatagcgtgaagggccggttcaccatctctcgggataacagcaagaatactctgtacctgcagatgaactccctgcgcgctgaagataccgctgtgtattactgcgccaagggctggctgggcaacttcgattactggggccagggaaccctcgtgactgtctcgagcgcttctgtggccgctccctccgtgttcatcttcccaccttccgacgagcagctgaagtccggcactgcctctgtcgtgtgcctgctgaacaacttctaccctcgggaagccaaggtgcagtggaaagtggataacgccctgcagtccggcaactcccaggaatccgtgaccgagcaggactccaaggacagcacctactccctgagcagcaccctgaccctgtccaaggccgactacgagaagcacaaggtgtacgcctgtgaagtgacccaccagggcctgtccagccccgtgaccaagtccttcaaccggggcgagtgc

SEQ ID NO: 196 - protein, 688 aa, Artificial
  (CLC-564) VHCH1-Heavy chain-(28H1) VHCL
EVQLLESGGGLVQPGGSLRLSCAASGFTFSSYAMSWVRQAPGKGLEWVSAISGSGGSTYYADSVKGRFTISRDNSKNTLYLQMNSLRAEDTAVYYCAFDVGPFDYWGQGTLVTVSSASTKGPSVFPLAPSSKSTSGGTAALGCLVKDYFPEPVTVSWNSGALTSGVHTFPAVLQSSGLYSLSSVVTVPSSSLGTQTYICNVNHKPSNTKVDKKVEPKSCDKTHTCPPCPAPEAAGGPSVFLFPPKPKDTLMISRTPEVTCVVVDVSHEDPEVKFNWYVDGVEVHNAKTKPREEQYNSTYRVVSVLTVLHQDWLNGKEYKCKVSNKALGAPIEKTISKAKGQPREPQVYTLPPSRDELTKNQVSLTCLVKGFYPSDIAVEWESNGQPENNYKTTPPVLDSDGSFFLYSKLTVDKSRWQQGNVFSCSVMHEALHNHYTQKSLSLSPGGGGGSGGGGSGGGGSGGGGSEVQLLESGGGLVQPGGSLRLSCAASGFTFSSHAMSWVRQAPGKGLEWVSAIWASGEQYYADSVKGRFTISRDNSKNTLYLQMNSLRAEDTAVYYCAKGWLGNFDYWGQGTLVTVSSASVAAPSVFIFPPSDEQLKSGTASVVCLLNNFYPREAKVQWKVDNALQSGNSQESVTEQDSKDSTYSLSSTLTLSKADYEKHKVYACEVTHQGLSSPVTKSFNRGEC

SEQ ID NO: 197 - DNA, 1350 bp, Artificial
  (28H1) VHCL-heavy chain hole DNA
gaagtgcagctgctggaatccggcggaggcctggtgcagcctggcggatctctgagactgtcctgcgccgcctccggcttcaccttctcctcccacgccatgtcctgggtccgacaggctcctggcaaaggcctggaatgggtgtccgccatctgggcctccggcgagcagtactacgccgactctgtgaagggccggttcaccatctcccgggacaactccaagaacaccctgtacctgcagatgaactccctgcgggccgaggacaccgccgtgtactactgtgccaagggctggctgggcaacttcgactactggggacagggcaccctggtcaccgtgtccagcgctagcgtggccgctcccagcgtgttcatcttcccacccagcgacgagcagctgaagtccggcacagccagcgtggtgtgcctgctgaacaacttctacccccgcgaggccaaggtgcagtggaaggtggacaacgccctgcagagcggcaacagccaggaatccgtgaccgagcaggacagcaaggactccacctacagcctgagcagcaccctgaccctgagcaaggccgactacgagaagcacaaggtgtacgcctgcgaagtgacccaccagggcctgtccagccccgtgaccaagagcttcaaccggggcgagtgcgacaagacccacacctgtcccccttgccctgcccctgaagctgctggtggcccttccgtgttcctgttccccccaaagcccaaggacaccctgatgatcagccggacccccgaagtgacctgcgtggtggtcgatgtgtcccacgaggaccctgaagtgaagttcaattggtacgtggacggcgtggaagtgcacaatgccaagaccaagccgcgggaggagcagtacaacagcacgtaccgtgtggtcagcgtcctcaccgtcctgcaccaggactggctgaatggcaaggagtacaagtgcaaggtctccaacaaagccctcggcgcccccatcgagaaaaccatctccaaagccaaagggcagccccgagaaccacaggtgtgcaccctgcccccatcccgggatgagctgaccaagaaccaggtcagcctctcgtgcgcagtcaaaggcttctatcccagcgacatcgccgtggagtgggagagcaatgggcagccggagaacaactacaagaccacgcctcccgtgctggactccgacggctccttcttcctcgtgagcaagctcaccgtggacaagagcaggtggcagcaggggaacgtcttctcatgctccgtgatgcatgaggctctgcacaaccactacacgcagaagagcctctccctgtctccgggtaaa

SEQ ID NO: 198 - protein, 450 aa, Artificial
  (28H1) VHCL-heavy chain hole
EVQLLESGGGLVQPGGSLRLSCAASGFTFSSHAMSWVRQAPGKGLEWVSAIWASGEQYYADSVKGRFTISRDNSKNTLYLQMNSLRAEDTAVYYCAKGWLGNFDYWGQGTLVTVSSASVAAPSVFIFPPSDEQLKSGTASVVCLLNNFYPREAKVQWKVDNALQSGNSQESVTEQDSKDSTYSLSSTLTLSKADYEKHKVYACEVTHQGLSSPVTKSFNRGECDKTHTCPPCPAPEAAGGPSVFLFPPKPKDTLMISRTPEVTCVVVDVSHEDPEVKFNWYVDGVEVHNAKTKPREEQYNSTYRVVSVLTVLHQDWLNGKEYKCKVSNKALGAPIEKTISKAKGQPREPQVCTLPPSRDELTKNQVSLSCAVKGFYPSDIAVEWESNGQPENNYKTTPPVLDSDGSFFLVSKLTVDKSRWQQGNVFSCSVMHEALHNHYTQKSLSLSPGK

SEQ ID NO: 199 - DNA, 1338 bp, Artificial
  (8H9) VHCH1-heavy chain knob DNA
caggtgcaattggtgcagtctggggctgaggtgaagaagcctgggtcctcggtgaaggtctcctgcaaggcctccggaggcacattcagcagctacgctataagctgggtgcgacaggcccctggacaagggctcgagtggatgggagggatcatccctatctttggtacagcaaactacgcacagaagttccagggcagggtcaccattactgcagacaaatccacgagcacagcctacatggagctgagcagcctgagatctgaggacaccgccgtgtattactgtgcgagagaatacggttggatggactactggggccaagggaccaccgtgaccgtctcctcagctagcaccaagggccctagcgtgttccctctggcccctagcagcaagagcacaagtggaggaacagccgccctgggctgcctggtcaaggactacttccccgagcccgtgaccgtgtcctggaattctggcgccctgacaagcggcgtgcacacatttccagccgtgctgcagagcagcggcctgtactctctgagcagcgtcgtgaccgtgccctctagctctctgggcacccagacctacatctgcaacgtgaaccacaagcccagcaacaccaaagtggacaagaaggtggaacccaagagctgcgacaagacccacacctgtcccccttgccctgcccctgaagctgctggtggcccttccgtgttcctgttccccccaaagcccaaggacaccctgatgatcagccggacccccgaagtgacctgcgtggtggtcgatgtgtcccacgaggaccctgaagtgaagttcaattggtacgtggacggcgtggaagtgcacaatgccaagaccaagccgcgggaggagcagtacaacagcacgtaccgtgtggtcagcgtcctcaccgtcctgcaccaggactggctgaatggcaaggagtacaagtgcaaggtctccaacaaagccctcggcgcccccatcgagaaaaccatctccaaagccaaagggcagccccgagaaccacaggtgtacaccctgcccccatgccgggatgagctgaccaagaaccaggtcagcctgtggtgcctggtcaaaggcttctatcccagcgacatcgccgtggagtgggagagcaatgggcagccggagaacaactacaagaccacgcctcccgtgctggactccgacggctccttcttcctctacagcaagctcaccgtggacaagagcaggtggcagcaggggaacgtcttctcatgctccgtgatgcatgaggctctgcacaaccactacacgcagaagagcctctccctgtctccgggtaaa

SEQ ID NO: 200 - protein, 446 aa, Artificial
  (8H9) VHCH1-heavy chain knob
QVQLVQSGAEVKKPGSSVKVSCKASGGTFSSYAISWVRQAPGQGLEWMGGIIPIFGTANYAQKFQGRVTITADKSTSTAYMELSSLRSEDTAVYYCAREYGWMDYWGQGTTVTVSSASTKGPSVFPLAPSSKSTSGGTAALGCLVKDYFPEPVTVSWNSGALTSGVHTFPAVLQSSGLYSLSSVVTVPSSSLGTQTYICNVNHKPSNTKVDKKVEPKSCDKTHTCPPCPAPEAAGGPSVFLFPPKPKDTLMISRTPEVTCVVVDVSHEDPEVKFNWYVDGVEVHNAKTKPREEQYNSTYRVVSVLTVLHQDWLNGKEYKCKVSNKALGAPIEKTISKAKGQPREPQVYTLPPCRDELTKNQVSLWCLVKGFYPSDIAVEWESNGQPENNYKTTPPVLDSDGSFFLYSKLTVDKSRWQQGNVFSCSVMHEALHNHYTQKSLSLSPGK

SEQ ID NO: 201 - DNA, 1343 bp, Artificial
  (49B4) VHCH1-heavy chain knob DNA
aggtgcaattggtgcagtctggggctgaggtgaagaagcctgggtcctcggtgaaggtctcctgcaaggcctccggaggcacattcagcagctacgctataagctgggtgcgacaggcccctggacaagggctcgagtggatgggagggatcatccctatctttggtacagcaaactacgcacagaagttccagggcagggtcaccattactgcagacaaatccacgagcacagcctacatggagctgagcagcctgagatctgaggacaccgccgtgtattactgtgcgagagaatactaccgtggtccgtacgactactggggccaagggaccaccgtgaccgtctcctcagctagcaccaagggccctagcgtgttccctctggcccctagcagcaagagcacaagtggaggaacagccgccctgggctgcctggtcaaggactacttccccgagcccgtgaccgtgtcctggaattctggcgccctgacaagcggcgtgcacacatttccagccgtgctgcagagcagcggcctgtactctctgagcagcgtcgtgaccgtgccctctagctctctgggcacccagacctacatctgcaacgtgaaccacaagcccagcaacaccaaagtggacaagaaggtggaacccaagagctgcgacaagacccacacctgtcccccttgccctgcccctgaagctgctggtggcccttccgtgttcctgttccccccaaagcccaaggacaccctgatgatcagccggacccccgaagtgacctgcgtggtggtcgatgtgtcccacgaggaccctgaagtgaagttcaattggtacgtggacggcgtggaagtgcacaatgccaagaccaagccgcgggaggagcagtacaacagcacgtaccgtgtggtcagcgtcctcaccgtcctgcaccaggactggctgaatggcaaggagtacaagtgcaaggtctccaacaaagccctcggcgcccccatcgagaaaaccatctccaaagccaaagggcagccccgagaaccacaggtgtacaccctgcccccatgccgggatgagctgaccaagaaccaggtcagcctgtggtgcctggtcaaaggcttctatcccagcgacatcgccgtggagtgggagagcaatgggcagccggagaacaactacaagaccacgcctcccgtgctggactccgacggctccttcttcctctacagcaagctcaccgtggacaagagcaggtggcagcaggggaacgtcttctcatgctccgtgatgcatgaggctctgcacaaccactacacgcagaagagcctctccctgtctccgggtaaa

SEQ ID NO: 202 - protein, 448 aa, Artificial
  (49B4) VHCH1-heavy chain knob
QVQLVQSGAEVKKPGSSVKVSCKASGGTFSSYAISWVRQAPGQGLEWMGGIIPIFGTANYAQKFQGRVTITADKSTSTAYMELSSLRSEDTAVYYCAREYYRGPYDYWGQGTTVTVSSASTKGPSVFPLAPSSKSTSGGTAALGCLVKDYFPEPVTVSWNSGALTSGVHTFPAVLQSSGLYSLSSVVTVPSSSLGTQTYICNVNHKPSNTKVDKKVEPKSCDKTHTCPPCPAPEAAGGPSVFLFPPKPKDTLMISRTPEVTCVVVDVSHEDPEVKFNWYVDGVEVHNAKTKPREEQYNSTYRVVSVLTVLHQDWLNGKEYKCKVSNKALGAPIEKTISKAKGQPREPQVYTLPPCRDELTKNQVSLWCLVKGFYPSDIAVEWESNGQPENNYKTTPPVLDSDGSFFLYSKLTVDKSRWQQGNVFSCSVMHEALHNHYTQKSLSLSPGK

SEQ ID NO: 203 - DNA, 1338 bp, Artificial
  (1G4) VHCH1-heavy chain knob DNA
caggtgcaattggtgcagtctggggctgaggtgaagaagcctgggtcctcggtgaaggtctcctgcaaggcctccggaggcacattcagcagctacgctataagctgggtgcgacaggcccctggacaagggctcgagtggatgggagggatcatccctatctttggtacagcaaactacgcacagaagttccagggcagggtcaccattactgcagacaaatccacgagcacagcctacatggagctgagcagcctgagatctgaggacaccgccgtgtattactgtgcgagagaatacggttctatggactactggggccaagggaccaccgtgaccgtctcctcagctagcaccaagggccctagcgtgttccctctggcccctagcagcaagagcacaagtggaggaacagccgccctgggctgcctggtcaaggactacttccccgagcccgtgaccgtgtcctggaattctggcgccctgacaagcggcgtgcacacatttccagccgtgctgcagagcagcggcctgtactctctgagcagcgtcgtgaccgtgccctctagctctctgggcacccagacctacatctgcaacgtgaaccacaagcccagcaacaccaaagtggacaagaaggtggaacccaagagctgcgacaagacccacacctgtcccccttgccctgcccctgaagctgctggtggcccttccgtgttcctgttccccccaaagcccaaggacaccctgatgatcagccggacccccgaagtgacctgcgtggtggtcgatgtgtcccacgaggaccctgaagtgaagttcaattggtacgtggacggcgtggaagtgcacaatgccaagaccaagccgcgggaggagcagtacaacagcacgtaccgtgtggtcagcgtcctcaccgtcctgcaccaggactggctgaatggcaaggagtacaagtgcaaggtctccaacaaagccctcggcgcccccatcgagaaaaccatctccaaagccaaagggcagccccgagaaccacaggtgtacaccctgcccccatgccgggatgagctgaccaagaaccaggtcagcctgtggtgcctggtcaaaggcttctatcccagcgacatcgccgtggagtgggagagcaatgggcagccggagaacaactacaagaccacgcctcccgtgctggactccgacggctccttcttcctctacagcaagctcaccgtggacaagagcaggtggcagcaggggaacgtcttctcatgctccgtgatgcatgaggctctgcacaaccactacacgcagaagagcctctccctgtctccgggtaaa

SEQ ID NO: 204 - protein, 446 aa, Artificial
  (1G4) VHCH1-heavy chain knob
QVQLVQSGAEVKKPGSSVKVSCKASGGTFSSYAISWVRQAPGQGLEWMGGIIPIFGTANYAQKFQGRVTITADKSTSTAYMELSSLRSEDTAVYYCAREYGSMDYWGQGTTVTVSSASTKGPSVFPLAPSSKSTSGGTAALGCLVKDYFPEPVTVSWNSGALTSGVHTFPAVLQSSGLYSLSSVVTVPSSSLGTQTYICNVNHKPSNTKVDKKVEPKSCDKTHTCPPCPAPEAAGGPSVFLFPPKPKDTLMISRTPEVTCVVVDVSHEDPEVKFNWYVDGVEVHNAKTKPREEQYNSTYRVVSVLTVLHQDWLNGKEYKCKVSNKALGAPIEKTISKAKGQPREPQVYTLPPCRDELTKNQVSLWCLVKGFYPSDIAVEWESNGQPENNYKTTPPVLDSDGSFFLYSKLTVDKSRWQQGNVFSCSVMHEALHNHYTQKSLSLSPGK

SEQ ID NO: 205 - DNA, 1356 bp, Artificial
  (20B7) VHCH1-heavy chain knob DNA
caggtgcaattggtgcagtctggggctgaggtgaagaagcctgggtcctcggtgaaggtctcctgcaaggcctccggaggcacattcagcagctacgctataagctgggtgcgacaggcccctggacaagggctcgagtggatgggagggatcatccctatctttggtacagcaaactacgcacagaagttccagggcagggtcaccattactgcagacaaatccacgagcacagcctacatggagctgagcagcctgagatctgaggacaccgccgtgtattactgtgcgagagttaactacccgtactcttactggggtgacttcgactactggggccaagggaccaccgtgaccgtctcctcagctagcaccaagggccctagcgtgttccctctggcccctagcagcaagagcacaagtggaggaacagccgccctgggctgcctggtcaaggactacttccccgagcccgtgaccgtgtcctggaattctggcgccctgacaagcggcgtgcacacatttccagccgtgctgcagagcagcggcctgtactctctgagcagcgtcgtgaccgtgccctctagctctctgggcacccagacctacatctgcaacgtgaaccacaagcccagcaacaccaaagtggacaagaaggtggaacccaagagctgcgacaagacccacacctgtcccccttgccctgcccctgaagctgctggtggcccttccgtgttcctgttccccccaaagcccaaggacaccctgatgatcagccggacccccgaagtgacctgcgtggtggtcgatgtgtcccacgaggaccctgaagtgaagttcaattggtacgtggacggcgtggaagtgcacaatgccaagaccaagccgcgggaggagcagtacaacagcacgtaccgtgtggtcagcgtcctcaccgtcctgcaccaggactggctgaatggcaaggagtacaagtgcaaggtctccaacaaagccctcggcgcccccatcgagaaaaccatctccaaagccaaagggcagccccgagaaccacaggtgtacaccctgcccccatgccgggatgagctgaccaagaaccaggtcagcctgtggtgcctggtcaaaggcttctatcccagcgacatcgccgtggagtgggagagcaatgggcagccggagaacaactacaagaccacgcctcccgtgctggactccgacggctccttcttcctctacagcaagctcaccgtggacaagagcaggtggcagcaggggaacgtcttctcatgctccgtgatgcatgaggctctgcacaaccactacacgcagaagagcctctccctgtctccgggtaaa

SEQ ID NO: 206 - protein, 452 aa, Artificial
  (20B7) VHCH1-heavy chain knob
QVQLVQSGAEVKKPGSSVKVSCKASGGTFSSYAISWVRQAPGQGLEWMGGIIPIFGTANYAQKFQGRVTITADKSTSTAYMELSSLRSEDTAVYYCARVNYPYSYWGDFDYWGQGTTVTVSSASTKGPSVFPLAPSSKSTSGGTAALGCLVKDYFPEPVTVSWNSGALTSGVHTFPAVLQSSGLYSLSSVVTVPSSSLGTQTYICNVNHKPSNTKVDKKVEPKSCDKTHTCPPCPAPEAAGGPSVFLFPPKPKDTLMISRTPEVTCVVVDVSHEDPEVKFNWYVDGVEVHNAKTKPREEQYNSTYRVVSVLTVLHQDWLNGKEYKCKVSNKALGAPIEKTISKAKGQPREPQVYTLPPCRDELTKNQVSLWCLVKGFYPSDIAVEWESNGQPENNYKTTPPVLDSDGSFFLYSKLTVDKSRWQQGNVFSCSVMHEALHNHYTQKSLSLSPGK

SEQ ID NO: 207 - DNA, 1338 bp, Artificial
  (CLC-563) VHCH1-heavy chain knob DNA
gaggtgcaattgttggagtctgggggaggcttggtacagcctggggggtccctgagactctcctgtgcagcctccggattcacctttagcagttatgccatgagctgggtccgccaggctccagggaaggggctggagtgggtctcagctattagtggtagtggtggtagcacatactacgcagactccgtgaagggccggttcaccatctccagagacaattccaagaacacgctgtatctgcagatgaacagcctgagagccgaggacacggccgtatattactgtgcgcttgacgttggtgctttcgactactggggccaaggagccctggtcaccgtctcgagtgctagcaccaagggccctagcgtgttccctctggcccctagcagcaagagcacaagtggaggaacagccgccctgggctgcctggtcaaggactacttccccgagcccgtgaccgtgtcctggaattctggcgccctgacaagcggcgtgcacacatttccagccgtgctgcagagcagcggcctgtactctctgagcagcgtcgtgaccgtgccctctagctctctgggcacccagacctacatctgcaacgtgaaccacaagcccagcaacaccaaagtggacaagaaggtggaacccaagagctgcgacaagacccacacctgtcccccttgccctgcccctgaagctgctggtggcccttccgtgttcctgttccccccaaagcccaaggacaccctgatgatcagccggacccccgaagtgacctgcgtggtggtcgatgtgtcccacgaggaccctgaagtgaagttcaattggtacgtggacggcgtggaagtgcacaatgccaagaccaagccgcgggaggagcagtacaacagcacgtaccgtgtggtcagcgtcctcaccgtcctgcaccaggactggctgaatggcaaggagtacaagtgcaaggtctccaacaaagccctcggcgcccccatcgagaaaaccatctccaaagccaaagggcagccccgagaaccacaggtgtacaccctgcccccatgccgggatgagctgaccaagaaccaggtcagcctgtggtgcctggtcaaaggcttctatcccagcgacatcgccgtggagtgggagagcaatgggcagccggagaacaactacaagaccacgcctcccgtgctggactccgacggctccttcttcctctacagcaagctcaccgtggacaagagcaggtggcagcaggggaacgtcttctcatgctccgtgatgcatgaggctctgcacaaccactacacgcagaagagcctctccctgtctccgggtaaa

SEQ ID NO: 208 - protein, 446 aa, Artificial
  (CLC-563) VHCH1-heavy chain knob
EVQLLESGGGLVQPGGSLRLSCAASGFTFSSYAMSWVRQAPGKGLEWVSAISGSGGSTYYADSVKGRFTISRDNSKNTLYLQMNSLRAEDTAVYYCALDVGAFDYWGQGALVTVSSASTKGPSVFPLAPSSKSTSGGTAALGCLVKDYFPEPVTVSWNSGALTSGVHTFPAVLQSSGLYSLSSVVTVPSSSLGTQTYICNVNHKPSNTKVDKKVEPKSCDKTHTCPPCPAPEAAGGPSVFLFPPKPKDTLMISRTPEVTCVVVDVSHEDPEVKFNWYVDGVEVHNAKTKPREEQYNSTYRVVSVLTVLHQDWLNGKEYKCKVSNKALGAPIEKTISKAKGQPREPQVYTLPPCRDELTKNQVSLWCLVKGFYPSDIAVEWESNGQPENNYKTTPPVLDSDGSFFLYSKLTVDKSRWQQGNVFSCSVMHEALHNHYTQKSLSLSPGK

SEQ ID NO: 209 - DNA, 1338 bp, Artificial
  (CLC-564) VHCH1-heavy chain knob DNA
gaggtgcaattgttggagtctgggggaggcttggtacagcctggggggtccctgagactctcctgtgcagcctccggattcacctttagcagttatgccatgagctgggtccgccaggctccagggaaggggctggagtgggtctcagctattagtggtagtggtggtagcacatactacgcagactccgtgaagggccggttcaccatctccagagacaattccaagaacacgctgtatctgcagatgaacagcctgagagccgaggacacggccgtatattactgtgcgttcgacgttggtccgttcgactactggggccaaggaaccctggtcaccgtctcgagtgctagcaccaagggccctagcgtgttccctctggcccctagcagcaagagcacaagtggaggaacagccgccctgggctgcctggtcaaggactacttccccgagcccgtgaccgtgtcctggaattctggcgccctgacaagcggcgtgcacacatttccagccgtgctgcagagcagcggcctgtactctctgagcagcgtcgtgaccgtgccctctagctctctgggcacccagacctacatctgcaacgtgaaccacaagcccagcaacaccaaagtggacaagaaggtggaacccaagagctgcgacaagacccacacctgtcccccttgccctgcccctgaagctgctggtggcccttccgtgttcctgttccccccaaagcccaaggacaccctgatgatcagccggacccccgaagtgacctgcgtggtggtcgatgtgtcccacgaggaccctgaagtgaagttcaattggtacgtggacggcgtggaagtgcacaatgccaagaccaagccgcgggaggagcagtacaacagcacgtaccgtgtggtcagcgtcctcaccgtcctgcaccaggactggctgaatggcaaggagtacaagtgcaaggtctccaacaaagccctcggcgcccccatcgagaaaaccatctccaaagccaaagggcagccccgagaaccacaggtgtacaccctgcccccatgccgggatgagctgaccaagaaccaggtcagcctgtggtgcctggtcaaaggcttctatcccagcgacatcgccgtggagtgggagagcaatgggcagccggagaacaactacaagaccacgcctcccgtgctggactccgacggctccttcttcctctacagcaagctcaccgtggacaagagcaggtggcagcaggggaacgtcttctcatgctccgtgatgcatgaggctctgcacaaccactacacgcagaagagcctctccctgtctccgggtaaa

SEQ ID NO: 210 - protein, 446 aa, Artificial
  (CLC-564) VHCH1-heavy chain knob
EVQLLESGGGLVQPGGSLRLSCAASGFTFSSYAMSWVRQAPGKGLEWVSAISGSGGSTYYADSVKGRFTISRDNSKNTLYLQMNSLRAEDTAVYYCAFDVGPFDYWGQGTLVTVSSASTKGPSVFPLAPSSKSTSGGTAALGCLVKDYFPEPVTVSWNSGALTSGVHTFPAVLQSSGLYSLSSVVTVPSSSLGTQTYICNVNHKPSNTKVDKKVEPKSCDKTHTCPPCPAPEAAGGPSVFLFPPKPKDTLMISRTPEVTCVVVDVSHEDPEVKFNWYVDGVEVHNAKTKPREEQYNSTYRVVSVLTVLHQDWLNGKEYKCKVSNKALGAPIEKTISKAKGQPREPQVYTLPPCRDELTKNQVSLWCLVKGFYPSDIAVEWESNGQPENNYKTTPPVLDSDGSFFLYSKLTVDKSRWQQGNVFSCSVMHEALHNHYTQKSLSLSPGK

SEQ ID NO: 211 - DNA, 2448 bp, Artificial
  (49B4) VHCH1_VHCH1 Fc knob VH (4B9) DNA
caggtgcaattggtgcagtctggggctgaggtgaagaagcctgggtcctcggtgaaggtctcctgcaaggcctccggaggcacattcagcagctacgctataagctgggtgcgacaggcccctggacaagggctcgagtggatgggagggatcatccctatctttggtacagcaaactacgcacagaagttccagggcagggtcaccattactgcagacaaatccacgagcacagcctacatggagctgagcagcctgagatctgaggacaccgccgtgtattactgtgcgagagaatactaccgtggtccgtacgactactggggccaagggaccaccgtgaccgtctcctcagctagcacaaagggacctagcgtgttccccctggcccccagcagcaagtctacatctggcggaacagccgccctgggctgcctcgtgaaggactactttcccgagcccgtgaccgtgtcctggaactctggcgctctgacaagcggcgtgcacacctttccagccgtgctgcagagcagcggcctgtactctctgagcagcgtcgtgacagtgcccagcagctctctgggcacccagacctacatctgcaacgtgaaccacaagcccagcaacaccaaggtggacaagaaggtggaacccaagagctgcgacggcggagggggatctggcggcggaggatcccaggtgcaattggtgcagtctggggctgaggtgaagaagcctgggtcctcggtgaaggtctcctgcaaggcctccggaggcacattcagcagctacgctataagctgggtgcgacaggcccctggacaagggctcgagtggatgggagggatcatccctatctttggtacagcaaactacgcacagaagttccagggcagggtcaccattactgcagacaaatccacgagcacagcctacatggagctgagcagcctgagatctgaggacaccgccgtgtattactgtgcgagagaatactaccgtggtccgtacgactactggggccaagggaccaccgtgaccgtctcctcagctagcaccaagggcccatcggtcttccccctggcaccctcctccaagagcacctctgggggcacagcggccctgggctgcctggtcaaggactacttccccgaaccggtgacggtgtcgtggaactcaggcgccctgaccagcggcgtgcacaccttcccggctgtcctacagtcctcaggactctactccctcagcagcgtggtgaccgtgccctccagcagcttgggcacccagacctacatctgcaacgtgaatcacaagcccagcaacaccaaggtggacaagaaagttgagcccaaatcttgtgacaaaactcacacatgcccaccgtgcccagcacctgaagctgcagggggaccgtcagtcttcctcttccccccaaaacccaaggacaccctcatgatctcccggacccctgaggtcacatgcgtggtggtggacgtgagccacgaagaccctgaggtcaagttcaactggtacgtggacggcgtggaggtgcataatgccaagacaaagccgcgggaggagcagtacaacagcacgtaccgtgtggtcagcgtcctcaccgtcctgcaccaggactggctgaatggcaaggagtacaagtgcaaggtctccaacaaagccctcggcgcccccatcgagaaaaccatctccaaagccaaagggcagccccgagaaccacaggtgtacaccctgcccccctgcagagatgagctgaccaagaaccaggtgtccctgtggtgtctggtcaagggcttctaccccagcgatatcgccgtggagtgggagagcaacggccagcctgagaacaactacaagaccaccccccctgtgctggacagcgacggcagcttcttcctgtactccaaactgaccgtggacaagagccggtggcagcagggcaacgtgttcagctgcagcgtgatgcacgaggccctgcacaaccactacacccagaagtccctgagcctgagccccggcggaggcggcggaagcggaggaggaggatctgggggcggaggttccggaggcggaggatccgaggtgcagctgctcgaaagcggcggaggactggtgcagcctggcggcagcctgagactgtcttgcgccgccagcggcttcaccttcagcagctacgccatgagctgggtccgccaggcccctggcaagggactggaatgggtgtccgccatcatcggctctggcgccagcacctactacgccgacagcgtgaagggccggttcaccatcagccgggacaacagcaagaacaccctgtacctgcagatgaacagcctgcgggccgaggacaccgccgtgtactactgcgccaagggatggttcggcggcttcaactactggggacagggcaccctggtcaccgtgtccagc

SEQ ID NO: 212 - DNA, 2421 bp, Artificial
  (49B4) VHCH1_VHCH1 Fc hole VL (4B9)  DNA
caggtgcaattggtgcagtctggggctgaggtgaagaagcctgggtcctcggtgaaggtctcctgcaaggcctccggaggcacattcagcagctacgctataagctgggtgcgacaggcccctggacaagggctcgagtggatgggagggatcatccctatctttggtacagcaaactacgcacagaagttccagggcagggtcaccattactgcagacaaatccacgagcacagcctacatggagctgagcagcctgagatctgaggacaccgccgtgtattactgtgcgagagaatactaccgtggtccgtacgactactggggccaagggaccaccgtgaccgtctcctcagctagcacaaagggacctagcgtgttccccctggcccccagcagcaagtctacatctggcggaacagccgccctgggctgcctcgtgaaggactactttcccgagcccgtgaccgtgtcctggaactctggcgctctgacaagcggcgtgcacacctttccagccgtgctgcagagcagcggcctgtactctctgagcagcgtcgtgacagtgcccagcagctctctgggcacccagacctacatctgcaacgtgaaccacaagcccagcaacaccaaggtggacaagaaggtggaacccaagagctgcgacggcggagggggatctggcggcggaggatcccaggtgcaattggtgcagtctggggctgaggtgaagaagcctgggtcctcggtgaaggtctcctgcaaggcctccggaggcacattcagcagctacgctataagctgggtgcgacaggcccctggacaagggctcgagtggatgggagggatcatccctatctttggtacagcaaactacgcacagaagttccagggcagggtcaccattactgcagacaaatccacgagcacagcctacatggagctgagcagcctgagatctgaggacaccgccgtgtattactgtgcgagagaatactaccgtggtccgtacgactactggggccaagggaccaccgtgaccgtctcctcagctagcaccaagggcccatcggtcttccccctggcaccctcctccaagagcacctctgggggcacagcggccctgggctgcctggtcaaggactacttccccgaaccggtgacggtgtcgtggaactcaggcgccctgaccagcggcgtgcacaccttcccggctgtcctacagtcctcaggactctactccctcagcagcgtggtgaccgtgccctccagcagcttgggcacccagacctacatctgcaacgtgaatcacaagcccagcaacaccaaggtggacaagaaagttgagcccaaatcttgtgacaaaactcacacatgcccaccgtgcccagcacctgaagctgcagggggaccgtcagtcttcctcttccccccaaaacccaaggacaccctcatgatctcccggacccctgaggtcacatgcgtggtggtggacgtgagccacgaagaccctgaggtcaagttcaactggtacgtggacggcgtggaggtgcataatgccaagacaaagccgcgggaggagcagtacaacagcacgtaccgtgtggtcagcgtcctcaccgtcctgcaccaggactggctgaatggcaaggagtacaagtgcaaggtctccaacaaagccctcggcgcccccatcgagaaaaccatctccaaagccaaagggcagccccgagaaccacaggtgtgcaccctgcccccatcccgggatgagctgaccaagaaccaggtcagcctctcgtgcgcagtcaaaggcttctatcccagcgacatcgccgtggagtgggagagcaatgggcagccggagaacaactacaagaccacgcctcccgtgctggactccgacggctccttcttcctcgtgagcaagctcaccgtggacaagagcaggtggcagcaggggaacgtcttctcatgctccgtgatgcatgaggctctgcacaaccactacacgcagaagagcctctccctgtctccgggtggaggcggcggaagcggaggaggaggatccggcggcggaggttccggaggcggtggatctgagatcgtgctgacccagtctcccggcaccctgtctctgagccctggcgagagagccaccctgtcctgcagagcctcccagtccgtgacctcctcctacctcgcctggtatcagcagaagcccggccaggcccctcggctgctgatcaacgtgggcagtcggagagccaccggcatccctgaccggttctccggctctggctccggcaccgacttcaccctgaccatctcccggctggaacccgaggacttcgccgtgtactactgccagcagggcatcatgctgccccccacctttggccagggcaccaaggtggaaatcaag

SEQ ID NO: 213 - protein, 816 aa, Artificial
  (49B4) VHCH1_VHCH1 Fc knob VH (4B9)
QVQLVQSGAEVKKPGSSVKVSCKASGGTFSSYAISWVRQAPGQGLEWMGGIIPIFGTANYAQKFQGRVTITADKSTSTAYMELSSLRSEDTAVYYCAREYYRGPYDYWGQGTTVTVSSASTKGPSVFPLAPSSKSTSGGTAALGCLVKDYFPEPVTVSWNSGALTSGVHTFPAVLQSSGLYSLSSVVTVPSSSLGTQTYICNVNHKPSNTKVDKKVEPKSCDGGGGSGGGGSQVQLVQSGAEVKKPGSSVKVSCKASGGTFSSYAISWVRQAPGQGLEWMGGIIPIFGTANYAQKFQGRVTITADKSTSTAYMELSSLRSEDTAVYYCAREYYRGPYDYWGQGTTVTVSSASTKGPSVFPLAPSSKSTSGGTAALGCLVKDYFPEPVTVSWNSGALTSGVHTFPAVLQSSGLYSLSSVVTVPSSSLGTQTYICNVNHKPSNTKVDKKVEPKSCDKTHTCPPCPAPEAAGGPSVFLFPPKPKDTLMISRTPEVTCVVVDVSHEDPEVKFNWYVDGVEVHNAKTKPREEQYNSTYRVVSVLTVLHQDWLNGKEYKCKVSNKALGAPIEKTISKAKGQPREPQVYTLPPCRDELTKNQVSLWCLVKGFYPSDIAVEWESNGQPENNYKTTPPVLDSDGSFFLYSKLTVDKSRWQQGNVFSCSVMHEALHNHYTQKSLSLSPGGGGGSGGGGSGGGGSGGGGSEVQLLESGGGLVQPGGSLRLSCAASGFTFSSYAMSWVRQAPGKGLEWVSAIIGSGASTYYADSVKGRFTISRDNSKNTLYLQMNSLRAEDTAVYYCAKGWFGGFNYWGQGTLVTVSS

SEQ ID NO: 214 - protein, 807 aa, Artificial
  (49B4) VHCH1_VHCH1 Fc hole VL (4B9)
QVQLVQSGAEVKKPGSSVKVSCKASGGTFSSYAISWVRQAPGQGLEWMGGIIPIFGTANYAQKFQGRVTITADKSTSTAYMELSSLRSEDTAVYYCAREYYRGPYDYWGQGTTVTVSSASTKGPSVFPLAPSSKSTSGGTAALGCLVKDYFPEPVTVSWNSGALTSGVHTFPAVLQSSGLYSLSSVVTVPSSSLGTQTYICNVNHKPSNTKVDKKVEPKSCDGGGGSGGGGSQVQLVQSGAEVKKPGSSVKVSCKASGGTFSSYAISWVRQAPGQGLEWMGGIIPIFGTANYAQKFQGRVTITADKSTSTAYMELSSLRSEDTAVYYCAREYYRGPYDYWGQGTTVTVSSASTKGPSVFPLAPSSKSTSGGTAALGCLVKDYFPEPVTVSWNSGALTSGVHTFPAVLQSSGLYSLSSVVTVPSSSLGTQTYICNVNHKPSNTKVDKKVEPKSCDKTHTCPPCPAPEAAGGPSVFLFPPKPKDTLMISRTPEVTCVVVDVSHEDPEVKFNWYVDGVEVHNAKTKPREEQYNSTYRVVSVLTVLHQDWLNGKEYKCKVSNKALGAPIEKTISKAKGQPREPQVCTLPPSRDELTKNQVSLSCAVKGFYPSDIAVEWESNGQPENNYKTTPPVLDSDGSFFLVSKLTVDKSRWQQGNVFSCSVMHEALHNHYTQKSLSLSPGGGGGSGGGGSGGGGSGGGGSEIVLTQSPGTLSLSPGERATLSCRASQSVTSSYLAWYQQKPGQAPRLLINVGSRRATGIPDRFSGSGSGTDFTLTISRLEPEDFAVYYCQQGIMLPPTFGQGTKVEIK

SEQ ID NO: 215 - DNA, 2445 bp, Artificial
  (49B4) VHCH1_VHCH1 Fc knob VH (28H1)  DNA
caggtgcaattggtgcagtctggggctgaggtgaagaagcctgggtcctcggtgaaggtctcctgcaaggcctccggaggcacattcagcagctacgctataagctgggtgcgacaggcccctggacaagggctcgagtggatgggagggatcatccctatctttggtacagcaaactacgcacagaagttccagggcagggtcaccattactgcagacaaatccacgagcacagcctacatggagctgagcagcctgagatctgaggacaccgccgtgtattactgtgcgagagaatactaccgtggtccgtacgactactggggccaagggaccaccgtgaccgtctcctcagctagcacaaagggacctagcgtgttccccctggcccccagcagcaagtctacatctggcggaacagccgccctgggctgcctcgtgaaggactactttcccgagcccgtgaccgtgtcctggaactctggcgctctgacaagcggcgtgcacacctttccagccgtgctgcagagcagcggcctgtactctctgagcagcgtcgtgacagtgcccagcagctctctgggcacccagacctacatctgcaacgtgaaccacaagcccagcaacaccaaggtggacaagaaggtggaacccaagagctgcgacggcggagggggatctggcggcggaggatcccaggtgcaattggtgcagtctggggctgaggtgaagaagcctgggtcctcggtgaaggtctcctgcaaggcctccggaggcacattcagcagctacgctataagctgggtgcgacaggcccctggacaagggctcgagtggatgggagggatcatccctatctttggtacagcaaactacgcacagaagttccagggcagggtcaccattactgcagacaaatccacgagcacagcctacatggagctgagcagcctgagatctgaggacaccgccgtgtattactgtgcgagagaatactaccgtggtccgtacgactactggggccaagggaccaccgtgaccgtctcctcagctagcaccaagggcccatcggtcttccccctggcaccctcctccaagagcacctctgggggcacagcggccctgggctgcctggtcaaggactacttccccgaaccggtgacggtgtcgtggaactcaggcgccctgaccagcggcgtgcacaccttcccggctgtcctacagtcctcaggactctactccctcagcagcgtggtgaccgtgccctccagcagcttgggcacccagacctacatctgcaacgtgaatcacaagcccagcaacaccaaggtggacaagaaagttgagcccaaatcttgtgacaaaactcacacatgcccaccgtgcccagcacctgaagctgcagggggaccgtcagtcttcctcttccccccaaaacccaaggacaccctcatgatctcccggacccctgaggtcacatgcgtggtggtggacgtgagccacgaagaccctgaggtcaagttcaactggtacgtggacggcgtggaggtgcataatgccaagacaaagccgcgggaggagcagtacaacagcacgtaccgtgtggtcagcgtcctcaccgtcctgcaccaggactggctgaatggcaaggagtacaagtgcaaggtctccaacaaagccctcggcgcccccatcgagaaaaccatctccaaagccaaagggcagccccgagaaccacaggtgtacaccctgcccccctgcagagatgagctgaccaagaaccaggtgtccctgtggtgtctggtcaagggcttctaccccagcgatatcgccgtggagtgggagagcaacggccagcctgagaacaactacaagaccaccccccctgtgctggacagcgacggcagcttcttcctgtactccaaactgaccgtggacaagagccggtggcagcagggcaacgtgttcagctgcagcgtgatgcacgaggccctgcacaaccactacacccagaagtccctgagcctgagccccggcggaggcggcggaagcggaggaggaggatccggaggagggggaagtggcggcggaggatctgaggtgcagctgctggaatccggcggaggcctggtgcagcctggcggatctctgagactgtcctgcgccgcctccggcttcaccttctcctcccacgccatgtcctgggtccgacaggctcctggcaaaggcctggaatgggtgtccgccatctgggcctccggcgagcagtactacgccgactctgtgaagggccggttcaccatctcccgggacaactccaagaacaccctgtacctgcagatgaactccctgcgggccgaggacaccgccgtgtactactgtgccaagggctggctgggcaacttcgactactggggccagggcaccctggtcaccgtgtccagc

SEQ ID NO: 216 - DNA, 2421 bp, Artificial
  (49B4) VHCH1_VHCH1 Fc hole VL (28H1)  DNA
caggtgcaattggtgcagtctggggctgaggtgaagaagcctgggtcctcggtgaaggtctcctgcaaggcctccggaggcacattcagcagctacgctataagctgggtgcgacaggcccctggacaagggctcgagtggatgggagggatcatccctatctttggtacagcaaactacgcacagaagttccagggcagggtcaccattactgcagacaaatccacgagcacagcctacatggagctgagcagcctgagatctgaggacaccgccgtgtattactgtgcgagagaatactaccgtggtccgtacgactactggggccaagggaccaccgtgaccgtctcctcagctagcacaaagggacctagcgtgttccccctggcccccagcagcaagtctacatctggcggaacagccgccctgggctgcctcgtgaaggactactttcccgagcccgtgaccgtgtcctggaactctggcgctctgacaagcggcgtgcacacctttccagccgtgctgcagagcagcggcctgtactctctgagcagcgtcgtgacagtgcccagcagctctctgggcacccagacctacatctgcaacgtgaaccacaagcccagcaacaccaaggtggacaagaaggtggaacccaagagctgcgacggcggagggggatctggcggcggaggatcccaggtgcaattggtgcagtctggggctgaggtgaagaagcctgggtcctcggtgaaggtctcctgcaaggcctccggaggcacattcagcagctacgctataagctgggtgcgacaggcccctggacaagggctcgagtggatgggagggatcatccctatctttggtacagcaaactacgcacagaagttccagggcagggtcaccattactgcagacaaatccacgagcacagcctacatggagctgagcagcctgagatctgaggacaccgccgtgtattactgtgcgagagaatactaccgtggtccgtacgactactggggccaagggaccaccgtgaccgtctcctcagctagcaccaagggcccatcggtcttccccctggcaccctcctccaagagcacctctgggggcacagcggccctgggctgcctggtcaaggactacttccccgaaccggtgacggtgtcgtggaactcaggcgccctgaccagcggcgtgcacaccttcccggctgtcctacagtcctcaggactctactccctcagcagcgtggtgaccgtgccctccagcagcttgggcacccagacctacatctgcaacgtgaatcacaagcccagcaacaccaaggtggacaagaaagttgagcccaaatcttgtgacaaaactcacacatgcccaccgtgcccagcacctgaagctgcagggggaccgtcagtcttcctcttccccccaaaacccaaggacaccctcatgatctcccggacccctgaggtcacatgcgtggtggtggacgtgagccacgaagaccctgaggtcaagttcaactggtacgtggacggcgtggaggtgcataatgccaagacaaagccgcgggaggagcagtacaacagcacgtaccgtgtggtcagcgtcctcaccgtcctgcaccaggactggctgaatggcaaggagtacaagtgcaaggtctccaacaaagccctcggcgcccccatcgagaaaaccatctccaaagccaaagggcagccccgagaaccacaggtgtgcaccctgcccccatcccgggatgagctgaccaagaaccaggtcagcctctcgtgcgcagtcaaaggcttctatcccagcgacatcgccgtggagtgggagagcaatgggcagccggagaacaactacaagaccacgcctcccgtgctggactccgacggctccttcttcctcgtgagcaagctcaccgtggacaagagcaggtggcagcaggggaacgtcttctcatgctccgtgatgcatgaggctctgcacaaccactacacgcagaagagcctctccctgtctccgggtggaggcggcggaagcggaggaggaggatccggtggtggcggatctgggggcggtggatctgagatcgtgctgacccagtctcccggcaccctgagcctgagccctggcgagagagccaccctgagctgcagagccagccagagcgtgagccggagctacctggcctggtatcagcagaagcccggccaggcccccagactgctgatcatcggcgccagcacccgggccaccggcatccccgatagattcagcggcagcggctccggcaccgacttcaccctgaccatcagccggctggaacccgaggacttcgccgtgtactactgccagcagggccaggtgatcccccccaccttcggccagggcaccaaggtggaaatcaag

SEQ ID NO: 217 - protein, 815 aa, Artificial
  (49B4) VHCH1_VHCH1 Fc knob VH (28H1)
QVQLVQSGAEVKKPGSSVKVSCKASGGTFSSYAISWVRQAPGQGLEWMGGIIPIFGTANYAQKFQGRVTITADKSTSTAYMELSSLRSEDTAVYYCAREYYRGPYDYWGQGTTVTVSSASTKGPSVFPLAPSSKSTSGGTAALGCLVKDYFPEPVTVSWNSGALTSGVHTFPAVLQSSGLYSLSSVVTVPSSSLGTQTYICNVNHKPSNTKVDKKVEPKSCDGGGGSGGGGSQVQLVQSGAEVKKPGSSVKVSCKASGGTFSSYAISWVRQAPGQGLEWMGGIIPIFGTANYAQKFQGRVTITADKSTSTAYMELSSLRSEDTAVYYCAREYYRGPYDYWGQGTTVTVSSASTKGPSVFPLAPSSKSTSGGTAALGCLVKDYFPEPVTVSWNSGALTSGVHTFPAVLQSSGLYSLSSVVTVPSSSLGTQTYICNVNHKPSNTKVDKKVEPKSCDKTHTCPPCPAPEAAGGPSVFLFPPKPKDTLMISRTPEVTCVVVDVSHEDPEVKFNWYVDGVEVHNAKTKPREEQYNSTYRVVSVLTVLHQDWLNGKEYKCKVSNKALGAPIEKTISKAKGQPREPQVYTLPPCRDELTKNQVSLWCLVKGFYPSDIAVEWESNGQPENNYKTTPPVLDSDGSFFLYSKLTVDKSRWQQGNVFSCSVMHEALHNHYTQKSLSLSPGGGGGSGGGGSGGGGSGGGGSEVQLLESGGGLVQPGGSLRLSCAASGFTFSSHAMSWVRQAPGKGLEWVSAIWASGEQYYADSVKGRFTISRDNSKNTLYLQMNSLRAEDTAVYYCAKGWLGNFDYWGQGTLVTVSS

SEQ ID NO: 218 - protein, 807 aa, Artificial
  (49B4) VHCH1_VHCH1 Fc hole VL (28H1)
QVQLVQSGAEVKKPGSSVKVSCKASGGTFSSYAISWVRQAPGQGLEWMGGIIPIFGTANYAQKFQGRVTITADKSTSTAYMELSSLRSEDTAVYYCAREYYRGPYDYWGQGTTVTVSSASTKGPSVFPLAPSSKSTSGGTAALGCLVKDYFPEPVTVSWNSGALTSGVHTFPAVLQSSGLYSLSSVVTVPSSSLGTQTYICNVNHKPSNTKVDKKVEPKSCDGGGGSGGGGSQVQLVQSGAEVKKPGSSVKVSCKASGGTFSSYAISWVRQAPGQGLEWMGGIIPIFGTANYAQKFQGRVTITADKSTSTAYMELSSLRSEDTAVYYCAREYYRGPYDYWGQGTTVTVSSASTKGPSVFPLAPSSKSTSGGTAALGCLVKDYFPEPVTVSWNSGALTSGVHTFPAVLQSSGLYSLSSVVTVPSSSLGTQTYICNVNHKPSNTKVDKKVEPKSCDKTHTCPPCPAPEAAGGPSVFLFPPKPKDTLMISRTPEVTCVVVDVSHEDPEVKFNWYVDGVEVHNAKTKPREEQYNSTYRVVSVLTVLHQDWLNGKEYKCKVSNKALGAPIEKTISKAKGQPREPQVCTLPPSRDELTKNQVSLSCAVKGFYPSDIAVEWESNGQPENNYKTTPPVLDSDGSFFLVSKLTVDKSRWQQGNVFSCSVMHEALHNHYTQKSLSLSPGGGGGSGGGGSGGGGSGGGGSEIVLTQSPGTLSLSPGERATLSCRASQSVSRSYLAWYQQKPGQAPRLLIIGASTRATGIPDRFSGSGSGTDFTLTISRLEPEDFAVYYCQQGQVIPPTFGQGTKVEIK

SEQ ID NO: 219 - DNA, 2442 bp, Artificial
  (49B4) VHCH1_VHCH1 Fc knob VH (DP47)  DNA
caggtgcaattggtgcagtctggggctgaggtgaagaagcctgggtcctcggtgaaggtctcctgcaaggcctccggaggcacattcagcagctacgctataagctgggtgcgacaggcccctggacaagggctcgagtggatgggagggatcatccctatctttggtacagcaaactacgcacagaagttccagggcagggtcaccattactgcagacaaatccacgagcacagcctacatggagctgagcagcctgagatctgaggacaccgccgtgtattactgtgcgagagaatactaccgtggtccgtacgactactggggccaagggaccaccgtgaccgtctcctcagctagcacaaagggacctagcgtgttccccctggcccccagcagcaagtctacatctggcggaacagccgccctgggctgcctcgtgaaggactactttcccgagcccgtgaccgtgtcctggaactctggcgctctgacaagcggcgtgcacacctttccagccgtgctgcagagcagcggcctgtactctctgagcagcgtcgtgacagtgcccagcagctctctgggcacccagacctacatctgcaacgtgaaccacaagcccagcaacaccaaggtggacaagaaggtggaacccaagagctgcgacggcggagggggatctggcggcggaggatcccaggtgcaattggtgcagtctggggctgaggtgaagaagcctgggtcctcggtgaaggtctcctgcaaggcctccggaggcacattcagcagctacgctataagctgggtgcgacaggcccctggacaagggctcgagtggatgggagggatcatccctatctttggtacagcaaactacgcacagaagttccagggcagggtcaccattactgcagacaaatccacgagcacagcctacatggagctgagcagcctgagatctgaggacaccgccgtgtattactgtgcgagagaatactaccgtggtccgtacgactactggggccaagggaccaccgtgaccgtctcctcagctagcaccaagggcccatcggtcttccccctggcaccctcctccaagagcacctctgggggcacagcggccctgggctgcctggtcaaggactacttccccgaaccggtgacggtgtcgtggaactcaggcgccctgaccagcggcgtgcacaccttcccggctgtcctacagtcctcaggactctactccctcagcagcgtggtgaccgtgccctccagcagcttgggcacccagacctacatctgcaacgtgaatcacaagcccagcaacaccaaggtggacaagaaagttgagcccaaatcttgtgacaaaactcacacatgcccaccgtgcccagcacctgaagctgcagggggaccgtcagtcttcctcttccccccaaaacccaaggacaccctcatgatctcccggacccctgaggtcacatgcgtggtggtggacgtgagccacgaagaccctgaggtcaagttcaactggtacgtggacggcgtggaggtgcataatgccaagacaaagccgcgggaggagcagtacaacagcacgtaccgtgtggtcagcgtcctcaccgtcctgcaccaggactggctgaatggcaaggagtacaagtgcaaggtctccaacaaagccctcggcgcccccatcgagaaaaccatctccaaagccaaagggcagccccgagaaccacaggtgtacaccctgcccccctgcagagatgagctgaccaagaaccaggtgtccctgtggtgtctggtcaagggcttctaccccagcgatatcgccgtggagtgggagagcaacggccagcctgagaacaactacaagaccaccccccctgtgctggacagcgacggcagcttcttcctgtactccaaactgaccgtggacaagagccggtggcagcagggcaacgtgttcagctgcagcgtgatgcacgaggccctgcacaaccactacacccagaagtccctgagcctgagccccggcggaggcggcggaagcggaggaggaggatccggaggagggggaagtggcggcggaggatctgaggtgcaattgttggagtctgggggaggcttggtacagcctggggggtccctgagactctcctgtgcagccagcggattcacctttagcagttatgccatgagctgggtccgccaggctccagggaaggggctggagtgggtctcagctattagtggtagtggtggtagcacatactacgcagactccgtgaagggccggttcaccatctccagagacaattccaagaacacgctgtatctgcagatgaacagcctgagagccgaggacacggccgtatattactgtgcgaaaggcagcggatttgactactggggccaaggaaccctggtcaccgtctcgagc

SEQ ID NO: 220 - DNA, 2421 bp, Artificial
  (49B4) VHCH1_VHCH1 Fc hole VL (DP47) DNA
caggtgcaattggtgcagtctggggctgaggtgaagaagcctgggtcctcggtgaaggtctcctgcaaggcctccggaggcacattcagcagctacgctataagctgggtgcgacaggcccctggacaagggctcgagtggatgggagggatcatccctatctttggtacagcaaactacgcacagaagttccagggcagggtcaccattactgcagacaaatccacgagcacagcctacatggagctgagcagcctgagatctgaggacaccgccgtgtattactgtgcgagagaatactaccgtggtccgtacgactactggggccaagggaccaccgtgaccgtctcctcagctagcacaaagggacctagcgtgttccccctggcccccagcagcaagtctacatctggcggaacagccgccctgggctgcctcgtgaaggactactttcccgagcccgtgaccgtgtcctggaactctggcgctctgacaagcggcgtgcacacctttccagccgtgctgcagagcagcggcctgtactctctgagcagcgtcgtgacagtgcccagcagctctctgggcacccagacctacatctgcaacgtgaaccacaagcccagcaacaccaaggtggacaagaaggtggaacccaagagctgcgacggcggagggggatctggcggcggaggatcccaggtgcaattggtgcagtctggggctgaggtgaagaagcctgggtcctcggtgaaggtctcctgcaaggcctccggaggcacattcagcagctacgctataagctgggtgcgacaggcccctggacaagggctcgagtggatgggagggatcatccctatctttggtacagcaaactacgcacagaagttccagggcagggtcaccattactgcagacaaatccacgagcacagcctacatggagctgagcagcctgagatctgaggacaccgccgtgtattactgtgcgagagaatactaccgtggtccgtacgactactggggccaagggaccaccgtgaccgtctcctcagctagcaccaagggcccatcggtcttccccctggcaccctcctccaagagcacctctgggggcacagcggccctgggctgcctggtcaaggactacttccccgaaccggtgacggtgtcgtggaactcaggcgccctgaccagcggcgtgcacaccttcccggctgtcctacagtcctcaggactctactccctcagcagcgtggtgaccgtgccctccagcagcttgggcacccagacctacatctgcaacgtgaatcacaagcccagcaacaccaaggtggacaagaaagttgagcccaaatcttgtgacaaaactcacacatgcccaccgtgcccagcacctgaagctgcagggggaccgtcagtcttcctcttccccccaaaacccaaggacaccctcatgatctcccggacccctgaggtcacatgcgtggtggtggacgtgagccacgaagaccctgaggtcaagttcaactggtacgtggacggcgtggaggtgcataatgccaagacaaagccgcgggaggagcagtacaacagcacgtaccgtgtggtcagcgtcctcaccgtcctgcaccaggactggctgaatggcaaggagtacaagtgcaaggtctccaacaaagccctcggcgcccccatcgagaaaaccatctccaaagccaaagggcagccccgagaaccacaggtgtgcaccctgcccccatcccgggatgagctgaccaagaaccaggtcagcctctcgtgcgcagtcaaaggcttctatcccagcgacatcgccgtggagtgggagagcaatgggcagccggagaacaactacaagaccacgcctcccgtgctggactccgacggctccttcttcctcgtgagcaagctcaccgtggacaagagcaggtggcagcaggggaacgtcttctcatgctccgtgatgcatgaggctctgcacaaccactacacgcagaagagcctctccctgtctccgggtggaggcggcggaagcggaggaggaggatccggaggcggcggaagcggagggggaggctctgaaattgtgctgacccagagccccggcaccctgtcactgtctccaggcgaaagagccaccctgagctgcagagccagccagagcgtgtccagctcttacctggcctggtatcagcagaagcccggacaggcccccagactgctgatctacggcgcctcttctagagccaccggcatccccgatagattcagcggcagcggctccggcaccgacttcaccctgacaatcagcagactggaacccgaggactttgccgtgtattactgccagcagtacggcagcagccccctgacctttggccagggcaccaaggtggaaatcaaa

SEQ ID NO: 221 - protein, 814 aa, Artificial
  (49B4) VHCH1_VHCH1 Fc knob VH (DP47)
QVQLVQSGAEVKKPGSSVKVSCKASGGTFSSYAISWVRQAPGQGLEWMGGIIPIFGTANYAQKFQGRVTITADKSTSTAYMELSSLRSEDTAVYYCAREYYRGPYDYWGQGTTVTVSSASTKGPSVFPLAPSSKSTSGGTAALGCLVKDYFPEPVTVSWNSGALTSGVHTFPAVLQSSGLYSLSSVVTVPSSSLGTQTYICNVNHKPSNTKVDKKVEPKSCDGGGGSGGGGSQVQLVQSGAEVKKPGSSVKVSCKASGGTFSSYAISWVRQAPGQGLEWMGGIIPIFGTANYAQKFQGRVTITADKSTSTAYMELSSLRSEDTAVYYCAREYYRGPYDYWGQGTTVTVSSASTKGPSVFPLAPSSKSTSGGTAALGCLVKDYFPEPVTVSWNSGALTSGVHTFPAVLQSSGLYSLSSVVTVPSSSLGTQTYICNVNHKPSNTKVDKKVEPKSCDKTHTCPPCPAPEAAGGPSVFLFPPKPKDTLMISRTPEVTCVVVDVSHEDPEVKFNWYVDGVEVHNAKTKPREEQYNSTYRVVSVLTVLHQDWLNGKEYKCKVSNKALGAPIEKTISKAKGQPREPQVYTLPPCRDELTKNQVSLWCLVKGFYPSDIAVEWESNGQPENNYKTTPPVLDSDGSFFLYSKLTVDKSRWQQGNVFSCSVMHEALHNHYTQKSLSLSPGGGGGSGGGGSGGGGSGGGGSEVQLLESGGGLVQPGGSLRLSCAASGFTFSSYAMSWVRQAPGKGLEWVSAISGSGGSTYYADSVKGRFTISRDNSKNTLYLQMNSLRAEDTAVYYCAKGSGFDYWGQGTLVTVSS

SEQ ID NO: 222 - protein, 807 aa, Artificial
  (49B4) VHCH1_VHCH1 Fc hole VL (DP47)
QVQLVQSGAEVKKPGSSVKVSCKASGGTFSSYAISWVRQAPGQGLEWMGGIIPIFGTANYAQKFQGRVTITADKSTSTAYMELSSLRSEDTAVYYCAREYYRGPYDYWGQGTTVTVSSASTKGPSVFPLAPSSKSTSGGTAALGCLVKDYFPEPVTVSWNSGALTSGVHTFPAVLQSSGLYSLSSVVTVPSSSLGTQTYICNVNHKPSNTKVDKKVEPKSCDGGGGSGGGGSQVQLVQSGAEVKKPGSSVKVSCKASGGTFSSYAISWVRQAPGQGLEWMGGIIPIFGTANYAQKFQGRVTITADKSTSTAYMELSSLRSEDTAVYYCAREYYRGPYDYWGQGTTVTVSSASTKGPSVFPLAPSSKSTSGGTAALGCLVKDYFPEPVTVSWNSGALTSGVHTFPAVLQSSGLYSLSSVVTVPSSSLGTQTYICNVNHKPSNTKVDKKVEPKSCDKTHTCPPCPAPEAAGGPSVFLFPPKPKDTLMISRTPEVTCVVVDVSHEDPEVKFNWYVDGVEVHNAKTKPREEQYNSTYRVVSVLTVLHQDWLNGKEYKCKVSNKALGAPIEKTISKAKGQPREPQVCTLPPSRDELTKNQVSLSCAVKGFYPSDIAVEWESNGQPENNYKTTPPVLDSDGSFFLVSKLTVDKSRWQQGNVFSCSVMHEALHNHYTQKSLSLSPGGGGGSGGGGSGGGGSGGGGSEIVLTQSPGTLSLSPGERATLSCRASQSVSSSYLAWYQQKPGQAPRLLIYGASSRATGIPDRFSGSGSGTDFTLTISRLEPEDFAVYYCQQYGSSPLTFGQGTKVEIK

SEQ ID NO: 223 - DNA, 642 bp, Artificial
  (49B4) VLCL*-light chain 1 DNA
gacatccagatgacccagtctccttccaccctgtctgcatctgtaggagaccgtgtcaccatcacttgccgtgccagtcagagtattagtagctggttggcctggtatcagcagaaaccagggaaagcccctaagctcctgatctatgatgcctccagtttggaaagtggggtcccatcacgtttcagcggcagtggatccgggacagaattcactctcaccatcagcagcttgcagcctgatgattttgcaacttattactgccaacagtatagttcgcagccgtatacgtttggccagggcaccaaagtcgagatcaagcgtacggtggctgcaccatctgtcttcatcttcccgccatctgatcggaagttgaaatctggaactgcctctgttgtgtgcctgctgaataacttctatcccagagaggccaaagtacagtggaaggtggataacgccctccaatcgggtaactcccaggagagtgtcacagagcaggacagcaaggacagcacctacagcctcagcagcaccctgacgctgagcaaagcagactacgagaaacacaaagtctacgcctgcgaagtcacccatcagggcctgagctcgcccgtcacaaagagcttcaacaggggagagtgt

SEQ ID NO: 224 - DNA, 2736 bp, Artificial
  (49B4) VHCH1*_VHCH1* Fc knob VLCH1 (28H1) DNA
caggtgcagctggtgcagtctggcgccgaagtgaagaaacccggcagcagcgtgaaggtgtcctgcaaggcttccggcggcaccttcagcagctacgccatttcttgggtgcgccaggcccctggacagggcctggaatggatgggcggcatcatccccatcttcggcaccgccaactacgcccagaaattccagggcagagtgaccatcaccgccgacaagagcaccagcaccgcctacatggaactgagcagcctgcggagcgaggacaccgccgtgtactactgcgccagagagtactacagaggcccctacgactactggggccagggcacaaccgtgaccgtgtctagcgccagcacaaagggccccagcgtgttccctctggcccctagcagcaagagcacatctggcggaacagccgccctgggctgcctggtggaagattacttccccgagcccgtgacagtgtcctggaactctggcgccctgacaagcggcgtgcacacctttccagccgtgctgcagagcagcggcctgtactcactgtccagcgtcgtgactgtgcccagcagcagcctgggaacccagacctacatctgcaacgtgaaccacaagcccagcaacaccaaggtggacgagaaggtggaacccaagagctgcgacggcggaggcggatctggcggcggaggatcccaggtgcagctggtgcagagcggagctgaagtgaaaaagcctggctcctccgtgaaagtgtcttgtaaagccagcggcggcacattctcatcctacgccatcagctgggtgcggcaggctccaggccagggactggaatggatgggaggaattatccctatttttgggacagccaattatgctcagaaatttcaggggcgcgtgacaattacagccgacaagtccacctctacagcttatatggaactgtcctccctgcgctccgaggatacagctgtgtattattgtgcccgcgagtactaccggggaccttacgattattggggacagggaaccacagtgactgtgtcctccgctagcaccaagggaccttccgtgtttcccctggctcccagctccaagtctacctctgggggcacagctgctctgggatgtctggtggaagattattttcctgaacctgtgaccgtgtcatggaacagcggagccctgacctccggggtgcacacattccctgctgtgctgcagtcctccggcctgtatagcctgagcagcgtcgtgaccgtgccttccagctctctgggcacacagacatatatctgtaatgtgaatcacaaaccctctaataccaaagtggatgagaaagtggaacctaagtcctgcgacaagacccacacctgtcccccttgtcctgcccctgaagctgctggcggcccatctgtgtttctgttccccccaaagcccaaggacaccctgatgatcagccggacccccgaagtgacctgcgtggtggtggatgtgtcccacgaggacccagaagtgaagttcaattggtacgtggacggcgtggaagtgcacaacgccaagaccaagccgcgggaagaacagtacaacagcacctaccgggtggtgtccgtgctgacagtgctgcaccaggactggctgaacggcaaagagtacaagtgcaaggtgtccaacaaggccctgggagcccccatcgagaaaaccatcagcaaggccaagggccagccccgcgaacctcaggtgtacaccctgcccccaagcagggacgagctgaccaagaaccaggtgtccctgacctgtctcgtgaagggcttctacccctccgatatcgccgtggaatgggagagcaacggccagcccgagaacaactacaagaccaccccccctgtgctggacagcgacggctcattcttcctgtactccaagctgaccgtggacaagagccggtggcagcagggcaacgtgttcagctgcagcgtgatgcacgaggccctgcacaaccactacacacagaagtctctgagcctgagccctggcggagggggaggatctgggggaggcggaagtgggggagggggttccggaggcggcggatcagaaattgtgctgacccagtcccccggcaccctgtcactgtctccaggcgaaagagccaccctgagctgtagggcctcccagagcgtgtccagaagctatctggcctggtatcagcagaagcccggacaggcccccagactgctgatcattggcgcctctaccagagccaccggcatccccgatagattcagcggctctggcagcggcaccgacttcaccctgaccatctccagactggaacccgaggactttgccgtgtactattgccagcagggccaagtgatcccccccacctttggccagggaacaaaggtggaaatcaagtccagcgcttccaccaagggcccctcagtgttcccactggcaccatccagcaagtccacaagcggaggaaccgccgctctgggctgtctcgtgaaagactactttccagagccagtgaccgtgtcctggaatagtggcgctctgacttctggcgtgcacactttccccgcagtgctgcagagttctggcctgtactccctgagtagcgtcgtgacagtgccctcctctagcctgggcactcagacttacatctgcaatgtgaatcataagccttccaacacaaaagtggacaaaaaagtggaacccaaatcttgc

SEQ ID NO: 225 - DNA, 669 bp, Artificial
  (28H1) VHCL- light chain  DNA
gaagtgcagctgctggaatccggcggaggcctggtgcagcctggcggatctctgagactgtcctgcgccgcctccggcttcaccttctcctcccacgccatgtcctgggtccgacaggctcctggcaaaggcctggaatgggtgtccgccatctgggcctccggcgagcagtactacgccgactctgtgaagggccggttcaccatctcccgggacaactccaagaacaccctgtacctgcagatgaactccctgcgggccgaggacaccgccgtgtactactgtgccaagggctggctgggcaacttcgactactggggacagggcaccctggtcaccgtgtccagcgctagcgtggccgctccctccgtgttcatcttcccaccttccgacgagcagctgaagtccggcaccgcttctgtcgtgtgcctgctgaacaacttctacccccgcgaggccaaggtgcagtggaaggtggacaacgccctgcagtccggcaacagccaggaatccgtgaccgagcaggactccaaggacagcacctactccctgtcctccaccctgaccctgtccaaggccgactacgagaagcacaaggtgtacgcctgcgaagtgacccaccagggcctgtctagccccgtgaccaagtctttcaaccggggcgagtgc

SEQ ID NO: 226 - protein, 214 aa, Artificial
  (49B4) VLCL*-light chain
DIQMTQSPSTLSASVGDRVTITCRASQSISSWLAWYQQKPGKAPKLLIYDASSLESGVPSRFSGSGSGTEFTLTISSLQPDDFATYYCQQYSSQPYTFGQGTKVEIKRTVAAPSVFIFPPSDRKLKSGTASVVCLLNNFYPREAKVQWKVDNALQSGNSQESVTEQDSKDSTYSLSSTLTLSKADYEKHKVYACEVTHQGLSSPVTKSFNRGEC

SEQ ID NO: 227 - protein, 912 aa, Artificial
  (49B4) VHCH1*_VHCH1* Fc knob VLCH1 (28H1)
QVQLVQSGAEVKKPGSSVKVSCKASGGTFSSYAISWVRQAPGQGLEWMGGIIPIFGTANYAQKFQGRVTITADKSTSTAYMELSSLRSEDTAVYYCAREYYRGPYDYWGQGTTVTVSSASTKGPSVFPLAPSSKSTSGGTAALGCLVEDYFPEPVTVSWNSGALTSGVHTFPAVLQSSGLYSLSSVVTVPSSSLGTQTYICNVNHKPSNTKVDEKVEPKSCDGGGGSGGGGSQVQLVQSGAEVKKPGSSVKVSCKASGGTFSSYAISWVRQAPGQGLEWMGGIIPIFGTANYAQKFQGRVTITADKSTSTAYMELSSLRSEDTAVYYCAREYYRGPYDYWGQGTTVTVSSASTKGPSVFPLAPSSKSTSGGTAALGCLVEDYFPEPVTVSWNSGALTSGVHTFPAVLQSSGLYSLSSVVTVPSSSLGTQTYICNVNHKPSNTKVDEKVEPKSCDKTHTCPPCPAPEAAGGPSVFLFPPKPKDTLMISRTPEVTCVVVDVSHEDPEVKFNWYVDGVEVHNAKTKPREEQYNSTYRVVSVLTVLHQDWLNGKEYKCKVSNKALGAPIEKTISKAKGQPREPQVYTLPPSRDELTKNQVSLTCLVKGFYPSDIAVEWESNGQPENNYKTTPPVLDSDGSFFLYSKLTVDKSRWQQGNVFSCSVMHEALHNHYTQKSLSLSPGGGGGSGGGGSGGGGSGGGGSEIVLTQSPGTLSLSPGERATLSCRASQSVSRSYLAWYQQKPGQAPRLLIIGASTRATGIPDRFSGSGSGTDFTLTISRLEPEDFAVYYCQQGQVIPPTFGQGTKVEIKSSASTKGPSVFPLAPSSKSTSGGTAALGCLVKDYFPEPVTVSWNSGALTSGVHTFPAVLQSSGLYSLSSVVTVPSSSLGTQTYICNVNHKPSNTKVDKKVEPKSC

SEQ ID NO: 228 - protein, 223 aa, Artificial
  (28H1) VHCL- light chain
EVQLLESGGGLVQPGGSLRLSCAASGFTFSSHAMSWVRQAPGKGLEWVSAIWASGEQYYADSVKGRFTISRDNSKNTLYLQMNSLRAEDTAVYYCAKGWLGNFDYWGQGTLVTVSSASVAAPSVFIFPPSDEQLKSGTASVVCLLNNFYPREAKVQWKVDNALQSGNSQESVTEQDSKDSTYSLSSTLTLSKADYEKHKVYACEVTHQGLSSPVTKSFNRGEC

SEQ ID NO: 229 - DNA, 2736 bp, Artificial
  (49B4) VHCH1*_VHCH1* Fc knob VLCH1 (DP47) DNA
caggtgcagctggtgcagtctggcgccgaagtgaagaaacccggcagcagcgtgaaggtgtcctgcaaggcttccggcggcaccttcagcagctacgccatttcttgggtgcgccaggcccctggacagggcctggaatggatgggcggcatcatccccatcttcggcaccgccaactacgcccagaaattccagggcagagtgaccatcaccgccgacaagagcaccagcaccgcctacatggaactgagcagcctgcggagcgaggacaccgccgtgtactactgcgccagagagtactacagaggcccctacgactactggggccagggcacaaccgtgaccgtgtctagcgccagcacaaagggccccagcgtgttccctctggcccctagcagcaagagcacatctggcggaacagccgccctgggctgcctggtggaagattacttccccgagcccgtgacagtgtcctggaactctggcgccctgacaagcggcgtgcacacctttccagccgtgctgcagagcagcggcctgtactcactgtccagcgtcgtgactgtgcccagcagcagcctgggaacccagacctacatctgcaacgtgaaccacaagcccagcaacaccaaggtggacgagaaggtggaacccaagagctgcgacggcggaggcggatctggcggcggaggatcccaggtgcagctggtgcagagcggagctgaagtgaaaaagcctggctcctccgtgaaagtgtcttgtaaagccagcggcggcacattctcatcctacgccatcagctgggtgcggcaggctccaggccagggactggaatggatgggaggaattatccctatttttgggacagccaattatgctcagaaatttcaggggcgcgtgacaattacagccgacaagtccacctctacagcttatatggaactgtcctccctgcgctccgaggatacagctgtgtattattgtgcccgcgagtactaccggggaccttacgattattggggacagggaaccacagtgactgtgtcctccgctagcaccaagggaccttccgtgtttcccctggctcccagctccaagtctacctctgggggcacagctgctctgggatgtctggtggaagattattttcctgaacctgtgaccgtgtcatggaacagcggagccctgacctccggggtgcacacattccctgctgtgctgcagtcctccggcctgtatagcctgagcagcgtcgtgaccgtgccttccagctctctgggcacacagacatatatctgtaatgtgaatcacaaaccctctaataccaaagtggatgagaaagtggaacctaagtcctgcgacaagacccacacctgtcccccttgtcctgcccctgaagctgctggcggcccatctgtgtttctgttccccccaaagcccaaggacaccctgatgatcagccggacccccgaagtgacctgcgtggtggtggatgtgtcccacgaggacccagaagtgaagttcaattggtacgtggacggcgtggaagtgcacaacgccaagaccaagccgcgggaagaacagtacaacagcacctaccgggtggtgtccgtgctgacagtgctgcaccaggactggctgaacggcaaagagtacaagtgcaaggtgtccaacaaggccctgggagcccccatcgagaaaaccatcagcaaggccaagggccagccccgcgaacctcaggtgtacaccctgcccccaagcagggacgagctgaccaagaaccaggtgtccctgacctgtctcgtgaagggcttctacccctccgatatcgccgtggaatgggagagcaacggccagcccgagaacaactacaagaccaccccccctgtgctggacagcgacggctcattcttcctgtactccaagctgaccgtggacaagagccggtggcagcagggcaacgtgttcagctgcagcgtgatgcacgaggccctgcacaaccactacacacagaagtctctgagcctgagccctggcggagggggaggatctgggggaggcggaagtgggggagggggttccggaggcggaggatccgaaatcgtgttaacgcagtctccaggcaccctgtctttgtctccaggggaaagagccaccctctcttgcagggccagtcagagtgttagcagcagctacttagcctggtaccagcagaaacctggccaggctcccaggctcctcatctatggagcatccagcagggccactggcatcccagacaggttcagtggcagtggatccgggacagacttcactctcaccatcagcagactggagcctgaagattttgcagtgtattactgtcagcagtatggtagctcaccgctgacgttcggccaggggaccaaagtggaaatcaaaagcagcgcttccaccaagggcccctcagtgttcccactggcaccatccagcaagtccacaagcggaggaaccgccgctctgggctgtctcgtgaaagactactttccagagccagtgaccgtgtcctggaatagtggcgctctgacttctggcgtgcacactttccccgcagtgctgcagagttctggcctgtactccctgagtagcgtcgtgacagtgccctcctctagcctgggcactcagacttacatctgcaatgtgaatcataagccttccaacacaaaagtggacaaaaaagtggaacccaaatcttgc

SEQ ID NO: 230 - DNA, 666 bp, Artificial
  (DP47) VHCL- light chain  DNA
gaggtgcaattgttggagtctgggggaggcttggtacagcctggggggtccctgagactctcctgtgcagcctccggattcacctttagcagttatgccatgagctgggtccgccaggctccagggaaggggctggagtgggtctcagctattagtggtagtggtggtagcacatactacgcagactccgtgaagggccggttcaccatctccagagacaattccaagaacacgctgtatctgcagatgaacagcctgagagccgaggacacggccgtatattactgtgcgaaaggcagcggatttgactactggggccaaggaaccctggtcaccgtctcgagtgctagcgtggccgctccctccgtgttcatcttcccaccttccgacgagcagctgaagtccggcaccgcttctgtcgtgtgcctgctgaacaacttctacccccgcgaggccaaggtgcagtggaaggtggacaacgccctgcagtccggcaacagccaggaatccgtgaccgagcaggactccaaggacagcacctactccctgtcctccaccctgaccctgtccaaggccgactacgagaagcacaaggtgtacgcctgcgaagtgacccaccagggcctgtctagccccgtgaccaagtctttcaaccggggcgagtgc

SEQ ID NO: 231 - protein, 912 aa, Artificial
  (49B4) VHCH1*_VHCH1* Fc knob VLCH1 (DP47)
QVQLVQSGAEVKKPGSSVKVSCKASGGTFSSYAISWVRQAPGQGLEWMGGIIPIFGTANYAQKFQGRVTITADKSTSTAYMELSSLRSEDTAVYYCAREYYRGPYDYWGQGTTVTVSSASTKGPSVFPLAPSSKSTSGGTAALGCLVEDYFPEPVTVSWNSGALTSGVHTFPAVLQSSGLYSLSSVVTVPSSSLGTQTYICNVNHKPSNTKVDEKVEPKSCDGGGGSGGGGSQVQLVQSGAEVKKPGSSVKVSCKASGGTFSSYAISWVRQAPGQGLEWMGGIIPIFGTANYAQKFQGRVTITADKSTSTAYMELSSLRSEDTAVYYCAREYYRGPYDYWGQGTTVTVSSASTKGPSVFPLAPSSKSTSGGTAALGCLVEDYFPEPVTVSWNSGALTSGVHTFPAVLQSSGLYSLSSVVTVPSSSLGTQTYICNVNHKPSNTKVDEKVEPKSCDKTHTCPPCPAPEAAGGPSVFLFPPKPKDTLMISRTPEVTCVVVDVSHEDPEVKFNWYVDGVEVHNAKTKPREEQYNSTYRVVSVLTVLHQDWLNGKEYKCKVSNKALGAPIEKTISKAKGQPREPQVYTLPPSRDELTKNQVSLTCLVKGFYPSDIAVEWESNGQPENNYKTTPPVLDSDGSFFLYSKLTVDKSRWQQGNVFSCSVMHEALHNHYTQKSLSLSPGGGGGSGGGGSGGGGSGGGGSEIVLTQSPGTLSLSPGERATLSCRASQSVSSSYLAWYQQKPGQAPRLLIYGASSRATGIPDRFSGSGSGTDFTLTISRLEPEDFAVYYCQQYGSSPLTFGQGTKVEIKSSASTKGPSVFPLAPSSKSTSGGTAALGCLVKDYFPEPVTVSWNSGALTSGVHTFPAVLQSSGLYSLSSVVTVPSSSLGTQTYICNVNHKPSNTKVDKKVEPKSC

SEQ ID NO: 232 - protein, 222 aa, Artificial
  (DP47) VHCL- light chain
EVQLLESGGGLVQPGGSLRLSCAASGFTFSSYAMSWVRQAPGKGLEWVSAISGSGGSTYYADSVKGRFTISRDNSKNTLYLQMNSLRAEDTAVYYCAKGSGFDYWGQGTLVTVSSASVAAPSVFIFPPSDEQLKSGTASVVCLLNNFYPREAKVQWKVDNALQSGNSQESVTEQDSKDSTYSLSSTLTLSKADYEKHKVYACEVTHQGLSSPVTKSFNRGEC

SEQ ID NO: 233 - protein, 807 aa, Artificial Sequence
  (49B4) VHCH1_VHCH1 Fc knob VL (4B9)
QVQLVQSGAEVKKPGSSVKVSCKASGGTFSSYAISWVRQAPGQGLEWMGGIIPIFGTANYAQKFQGRVTITADKSTSTAYMELSSLRSEDTAVYYCAREYYRGPYDYWGQGTTVTVSSASTKGPSVFPLAPSSKSTSGGTAALGCLVKDYFPEPVTVSWNSGALTSGVHTFPAVLQSSGLYSLSSVVTVPSSSLGTQTYICNVNHKPSNTKVDKKVEPKSCDGGGGSGGGGSQVQLVQSGAEVKKPGSSVKVSCKASGGTFSSYAISWVRQAPGQGLEWMGGIIPIFGTANYAQKFQGRVTITADKSTSTAYMELSSLRSEDTAVYYCAREYYRGPYDYWGQGTTVTVSSASTKGPSVFPLAPSSKSTSGGTAALGCLVKDYFPEPVTVSWNSGALTSGVHTFPAVLQSSGLYSLSSVVTVPSSSLGTQTYICNVNHKPSNTKVDKKVEPKSCDKTHTCPPCPAPEAAGGPSVFLFPPKPKDTLMISRTPEVTCVVVDVSHEDPEVKFNWYVDGVEVHNAKTKPREEQYNSTYRVVSVLTVLHQDWLNGKEYKCKVSNKALGAPIEKTISKAKGQPREPQVYTLPPCRDELTKNQVSLWCLVKGFYPSDIAVEWESNGQPENNYKTTPPVLDSDGSFFLYSKLTVDKSRWQQGNVFSCSVMHEALHNHYTQKSLSLSPGGGGGSGGGGSGGGGSGGGGSEIVLTQSPGTLSLSPGERATLSCRASQSVTSSYLAWYQQKPGQAPRLLINVGSRRATGIPDRFSGSGSGTDFTLTISRLEPEDFAVYYCQQGIMLPPTFGQGTKVEIK

SEQ ID NO: 234 - protein, 816 aa, Artificial Sequence
  (49B4) VHCH1_VHCH1 Fc hole VH (4B9)
QVQLVQSGAEVKKPGSSVKVSCKASGGTFSSYAISWVRQAPGQGLEWMGGIIPIFGTANYAQKFQGRVTITADKSTSTAYMELSSLRSEDTAVYYCAREYYRGPYDYWGQGTTVTVSSASTKGPSVFPLAPSSKSTSGGTAALGCLVKDYFPEPVTVSWNSGALTSGVHTFPAVLQSSGLYSLSSVVTVPSSSLGTQTYICNVNHKPSNTKVDKKVEPKSCDGGGGSGGGGSQVQLVQSGAEVKKPGSSVKVSCKASGGTFSSYAISWVRQAPGQGLEWMGGIIPIFGTANYAQKFQGRVTITADKSTSTAYMELSSLRSEDTAVYYCAREYYRGPYDYWGQGTTVTVSSASTKGPSVFPLAPSSKSTSGGTAALGCLVKDYFPEPVTVSWNSGALTSGVHTFPAVLQSSGLYSLSSVVTVPSSSLGTQTYICNVNHKPSNTKVDKKVEPKSCDKTHTCPPCPAPEAAGGPSVFLFPPKPKDTLMISRTPEVTCVVVDVSHEDPEVKFNWYVDGVEVHNAKTKPREEQYNSTYRVVSVLTVLHQDWLNGKEYKCKVSNKALGAPIEKTISKAKGQPREPQVCTLPPSRDELTKNQVSLSCAVKGFYPSDIAVEWESNGQPENNYKTTPPVLDSDGSFFLVSKLTVDKSRWQQGNVFSCSVMHEALHNHYTQKSLSLSPGGGGGSGGGGSGGGGSGGGGSEVQLLESGGGLVQPGGSLRLSCAASGFTFSSYAMSWVRQAPGKGLEWVSAIIGSGASTYYADSVKGRFTISRDNSKNTLYLQMNSLRAEDTAVYYCAKGWFGGFNYWGQGTLVTVSS

SEQ ID NO: 235 - DNA, 2448 bp, Artificial Sequence
  (49B4) VHCH1_VHCH1 Fc wt knob VH (4B9)  DNA
caggtgcaattggtgcagtctggggctgaggtgaagaagcctgggtcctcggtgaaggtctcctgcaaggcctccggaggcacattcagcagctacgctataagctgggtgcgacaggcccctggacaagggctcgagtggatgggagggatcatccctatctttggtacagcaaactacgcacagaagttccagggcagggtcaccattactgcagacaaatccacgagcacagcctacatggagctgagcagcctgagatctgaggacaccgccgtgtattactgtgcgagagaatactaccgtggtccgtacgactactggggccaagggaccaccgtgaccgtctcctcagctagcacaaagggacctagcgtgttccccctggcccccagcagcaagtctacatctggcggaacagccgccctgggctgcctcgtgaaggactactttcccgagcccgtgaccgtgtcctggaactctggcgctctgacaagcggcgtgcacacctttccagccgtgctgcagagcagcggcctgtactctctgagcagcgtcgtgacagtgcccagcagctctctgggcacccagacctacatctgcaacgtgaaccacaagcccagcaacaccaaggtggacaagaaggtggaacccaagagctgcgacggcggagggggatctggcggcggaggatcccaggtgcaattggtgcagtctggggctgaggtgaagaagcctgggtcctcggtgaaggtctcctgcaaggcctccggaggcacattcagcagctacgctataagctgggtgcgacaggcccctggacaagggctcgagtggatgggagggatcatccctatctttggtacagcaaactacgcacagaagttccagggcagggtcaccattactgcagacaaatccacgagcacagcctacatggagctgagcagcctgagatctgaggacaccgccgtgtattactgtgcgagagaatactaccgtggtccgtacgactactggggccaagggaccaccgtgaccgtctcctcagctagcaccaagggcccatcggtcttccccctggcaccctcctccaagagcacctctgggggcacagcggccctgggctgcctggtcaaggactacttccccgaaccggtgacggtgtcgtggaactcaggcgccctgaccagcggcgtgcacaccttcccggctgtcctacagtcctcaggactctactccctcagcagcgtggtgaccgtgccctccagcagcttgggcacccagacctacatctgcaacgtgaatcacaagcccagcaacaccaaggtggacaagaaagttgagcccaaatcttgtgacaaaactcacacatgcccaccgtgcccagcacctgaactcctggggggaccgtcagtcttcctcttccccccaaaacccaaggacaccctcatgatctcccggacccctgaggtcacatgcgtggtggtggacgtgagccacgaagaccctgaggtcaagttcaactggtacgtggacggcgtggaggtgcataatgccaagacaaagccgcgggaggagcagtacaacagcacgtaccgtgtggtcagcgtcctcaccgtcctgcaccaggactggctgaatggcaaggagtacaagtgcaaggtctccaacaaagccctcccagcccccatcgagaaaaccatctccaaagccaaagggcagccccgagaaccacaggtgtacaccctgcccccctgcagagatgagctgaccaagaaccaggtgtccctgtggtgtctggtcaagggcttctaccccagcgatatcgccgtggagtgggagagcaacggccagcctgagaacaactacaagaccaccccccctgtgctggacagcgacggcagcttcttcctgtactccaaactgaccgtggacaagagccggtggcagcagggcaacgtgttcagctgcagcgtgatgcacgaggccctgcacaaccactacacccagaagtccctgagcctgagccccggcggaggcggcggaagcggaggaggaggatctgggggcggaggttccggaggcggaggatccgaggtgcagctgctcgaaagcggcggaggactggtgcagcctggcggcagcctgagactgtcttgcgccgccagcggcttcaccttcagcagctacgccatgagctgggtccgccaggcccctggcaagggactggaatgggtgtccgccatcatcggctctggcgccagcacctactacgccgacagcgtgaagggccggttcaccatcagccgggacaacagcaagaacaccctgtacctgcagatgaacagcctgcgggccgaggacaccgccgtgtactactgcgccaagggatggttcggcggcttcaactactggggacagggcaccctggtcaccgtgtccagc

SEQ ID NO: 236 - DNA, 2421 bp, Artificial Sequence
  (49B4) VHCH1_VHCH1 Fc wt hole  VL (4B9)  DNA
caggtgcaattggtgcagtctggggctgaggtgaagaagcctgggtcctcggtgaaggtctcctgcaaggcctccggaggcacattcagcagctacgctataagctgggtgcgacaggcccctggacaagggctcgagtggatgggagggatcatccctatctttggtacagcaaactacgcacagaagttccagggcagggtcaccattactgcagacaaatccacgagcacagcctacatggagctgagcagcctgagatctgaggacaccgccgtgtattactgtgcgagagaatactaccgtggtccgtacgactactggggccaagggaccaccgtgaccgtctcctcagctagcacaaagggacctagcgtgttccccctggcccccagcagcaagtctacatctggcggaacagccgccctgggctgcctcgtgaaggactactttcccgagcccgtgaccgtgtcctggaactctggcgctctgacaagcggcgtgcacacctttccagccgtgctgcagagcagcggcctgtactctctgagcagcgtcgtgacagtgcccagcagctctctgggcacccagacctacatctgcaacgtgaaccacaagcccagcaacaccaaggtggacaagaaggtggaacccaagagctgcgacggcggagggggatctggcggcggaggatcccaggtgcaattggtgcagtctggggctgaggtgaagaagcctgggtcctcggtgaaggtctcctgcaaggcctccggaggcacattcagcagctacgctataagctgggtgcgacaggcccctggacaagggctcgagtggatgggagggatcatccctatctttggtacagcaaactacgcacagaagttccagggcagggtcaccattactgcagacaaatccacgagcacagcctacatggagctgagcagcctgagatctgaggacaccgccgtgtattactgtgcgagagaatactaccgtggtccgtacgactactggggccaagggaccaccgtgaccgtctcctcagctagcaccaagggcccatcggtcttccccctggcaccctcctccaagagcacctctgggggcacagcggccctgggctgcctggtcaaggactacttccccgaaccggtgacggtgtcgtggaactcaggcgccctgaccagcggcgtgcacaccttcccggctgtcctacagtcctcaggactctactccctcagcagcgtggtgaccgtgccctccagcagcttgggcacccagacctacatctgcaacgtgaatcacaagcccagcaacaccaaggtggacaagaaagttgagcccaaatcttgtgacaaaactcacacatgcccaccgtgcccagcacctgaactcctggggggaccgtcagtcttcctcttccccccaaaacccaaggacaccctcatgatctcccggacccctgaggtcacatgcgtggtggtggacgtgagccacgaagaccctgaggtcaagttcaactggtacgtggacggcgtggaggtgcataatgccaagacaaagccgcgggaggagcagtacaacagcacgtaccgtgtggtcagcgtcctcaccgtcctgcaccaggactggctgaatggcaaggagtacaagtgcaaggtctccaacaaagccctcccagcccccatcgagaaaaccatctccaaagccaaagggcagccccgagaaccacaggtgtgcaccctgcccccatcccgggatgagctgaccaagaaccaggtcagcctctcgtgcgcagtcaaaggcttctatcccagcgacatcgccgtggagtgggagagcaatgggcagccggagaacaactacaagaccacgcctcccgtgctggactccgacggctccttcttcctcgtgagcaagctcaccgtggacaagagcaggtggcagcaggggaacgtcttctcatgctccgtgatgcatgaggctctgcacaaccactacacgcagaagagcctctccctgtctccgggtggaggcggcggaagcggaggaggaggatccggcggcggaggttccggaggcggtggatctgagatcgtgctgacccagtctcccggcaccctgtctctgagccctggcgagagagccaccctgtcctgcagagcctcccagtccgtgacctcctcctacctcgcctggtatcagcagaagcccggccaggcccctcggctgctgatcaacgtgggcagtcggagagccaccggcatccctgaccggttctccggctctggctccggcaccgacttcaccctgaccatctcccggctggaacccgaggacttcgccgtgtactactgccagcagggcatcatgctgccccccacctttggccagggcaccaaggtggaaatcaag

SEQ ID NO: 237 - protein, 816 aa, Artificial Sequence
  (49B4) VHCH1_VHCH1 Fc wt knob VH (4B9)
QVQLVQSGAEVKKPGSSVKVSCKASGGTFSSYAISWVRQAPGQGLEWMGGIIPIFGTANYAQKFQGRVTITADKSTSTAYMELSSLRSEDTAVYYCAREYYRGPYDYWGQGTTVTVSSASTKGPSVFPLAPSSKSTSGGTAALGCLVKDYFPEPVTVSWNSGALTSGVHTFPAVLQSSGLYSLSSVVTVPSSSLGTQTYICNVNHKPSNTKVDKKVEPKSCDGGGGSGGGGSQVQLVQSGAEVKKPGSSVKVSCKASGGTFSSYAISWVRQAPGQGLEWMGGIIPIFGTANYAQKFQGRVTITADKSTSTAYMELSSLRSEDTAVYYCAREYYRGPYDYWGQGTTVTVSSASTKGPSVFPLAPSSKSTSGGTAALGCLVKDYFPEPVTVSWNSGALTSGVHTFPAVLQSSGLYSLSSVVTVPSSSLGTQTYICNVNHKPSNTKVDKKVEPKSCDKTHTCPPCPAPELLGGPSVFLFPPKPKDTLMISRTPEVTCVVVDVSHEDPEVKFNWYVDGVEVHNAKTKPREEQYNSTYRVVSVLTVLHQDWLNGKEYKCKVSNKALPAPIEKTISKAKGQPREPQVYTLPPCRDELTKNQVSLWCLVKGFYPSDIAVEWESNGQPENNYKTTPPVLDSDGSFFLYSKLTVDKSRWQQGNVFSCSVMHEALHNHYTQKSLSLSPGGGGGSGGGGSGGGGSGGGGSEVQLLESGGGLVQPGGSLRLSCAASGFTFSSYAMSWVRQAPGKGLEWVSAIIGSGASTYYADSVKGRFTISRDNSKNTLYLQMNSLRAEDTAVYYCAKGWFGGFNYWGQGTLVTVSS

SEQ ID NO: 238 - protein, 807 aa, Artificial Sequence
  (49B4) VHCH1_VHCH1 Fc wt hole VL (4B9)
QVQLVQSGAEVKKPGSSVKVSCKASGGTFSSYAISWVRQAPGQGLEWMGGIIPIFGTANYAQKFQGRVTITADKSTSTAYMELSSLRSEDTAVYYCAREYYRGPYDYWGQGTTVTVSSASTKGPSVFPLAPSSKSTSGGTAALGCLVKDYFPEPVTVSWNSGALTSGVHTFPAVLQSSGLYSLSSVVTVPSSSLGTQTYICNVNHKPSNTKVDKKVEPKSCDGGGGSGGGGSQVQLVQSGAEVKKPGSSVKVSCKASGGTFSSYAISWVRQAPGQGLEWMGGIIPIFGTANYAQKFQGRVTITADKSTSTAYMELSSLRSEDTAVYYCAREYYRGPYDYWGQGTTVTVSSASTKGPSVFPLAPSSKSTSGGTAALGCLVKDYFPEPVTVSWNSGALTSGVHTFPAVLQSSGLYSLSSVVTVPSSSLGTQTYICNVNHKPSNTKVDKKVEPKSCDKTHTCPPCPAPELLGGPSVFLFPPKPKDTLMISRTPEVTCVVVDVSHEDPEVKFNWYVDGVEVHNAKTKPREEQYNSTYRVVSVLTVLHQDWLNGKEYKCKVSNKALPAPIEKTISKAKGQPREPQVCTLPPSRDELTKNQVSLSCAVKGFYPSDIAVEWESNGQPENNYKTTPPVLDSDGSFFLVSKLTVDKSRWQQGNVFSCSVMHEALHNHYTQKSLSLSPGGGGGSGGGGSGGGGSGGGGSEIVLTQSPGTLSLSPGERATLSCRASQSVTSSYLAWYQQKPGQAPRLLINVGSRRATGIPDRFSGSGSGTDFTLTISRLEPEDFAVYYCQQGIMLPPTFGQGTKVEIK

SEQ ID NO: 239 - protein, 163 aa, Homo sapiens
LQDPCSNCPAGTFCDNNRNQICSPCPPNSFSSAGGQRTCDICRQCKGVFRTRKECSSTSNAECDCTPGFHCLGAGCSMCEQDCKQGQELTKKGCKDCCFGTFNDQKRGICRPWTNCSLDGKSVLVNGTKERDVVCGPSPADLSPGASSVTPPAPAREPGHSPQ

SEQ ID NO: 240 - protein, 163 aa, cynomolgus
LQDLCSNCPAGTFCDNNRSQICSPCPPNSFSSAGGQRTCDICRQCKGVFKTRKECSSTSNAECDCISGYHCLGAECSMCEQDCKQGQELTKKGCKDCCFGTFNDQKRGICRPWTNCSLDGKSVLVNGTKERDVVCGPSPADLSPGASSATPPAPAREPGHSPQ

SEQ ID NO: 241 - protein, 164 aa, Mus musculus
VQNSCDNCQPGTFCRKYNPVCKSCPPSTFSSIGGQPNCNICRVCAGYFRFKKFCSSTHNAECECIEGFHCLGPQCTRCEKDCRPGQELTKQGCKTCSLGTFNDQNGTGVCRPWTNCSLDGRSVLKTGTTEKDVVCGPPVVSFSPSTTISVTPEGGPGGHSLQVL

SEQ ID NO: 242 - DNA, 1266 bp, Artificial Sequence
  Nucleotide sequence of human 4-1BB antigen Fc knob chain
ctgcaggacccctgcagcaactgccctgccggcaccttctgcgacaacaaccggaaccagatctgcagcccctgcccccccaacagcttcagctctgccggcggacagcggacctgcgacatctgcagacagtgcaagggcgtgttcagaacccggaaagagtgcagcagcaccagcaacgccgagtgcgactgcacccccggcttccattgtctgggagccggctgcagcatgtgcgagcaggactgcaagcagggccaggaactgaccaagaagggctgcaaggactgctgcttcggcaccttcaacgaccagaagcggggcatctgccggccctggaccaactgtagcctggacggcaagagcgtgctggtcaacggcaccaaagaacgggacgtcgtgtgcggccccagccctgctgatctgtctcctggggccagcagcgtgacccctcctgcccctgccagagagcctggccactctcctcaggtcgacgaacagttatattttcagggcggctcacccaaatctgcagacaaaactcacacatgcccaccgtgcccagcacctgaactcctggggggaccgtcagtcttcctcttccccccaaaacccaaggacaccctcatgatctcccggacccctgaggtcacatgcgtggtggtggacgtgagccacgaagaccctgaggtcaagttcaactggtacgtggacggcgtggaggtgcataatgccaagacaaagccgcgggaggagcagtacaacagcacgtaccgtgtggtcagcgtcctcaccgtcctgcaccaggactggctgaatggcaaggagtacaagtgcaaggtctccaacaaagccctcccagcccccatcgagaaaaccatctccaaagccaaagggcagccccgagaaccacaggtgtacaccctgcccccatgccgggatgagctgaccaagaaccaggtcagcctgtggtgcctggtcaaaggcttctatcccagcgacatcgccgtggagtgggagagcaatgggcagccggagaacaactacaagaccacgcctcccgtgctggactccgacggctccttcttcctctacagcaagctcaccgtggacaagagcaggtggcagcaggggaacgtcttctcatgctccgtgatgcatgaggctctgcacaaccactacacgcagaagagcctctccctgtctccgggtaaatccggaggcctgaacgacatcttcgaggcccagaagattgaatggcacgag

SEQ ID NO: 243 - DNA, 1266 bp, Artificial Sequence
  Nucleotide sequence of cynomolgus 4-1BB antigen Fc knob chain
ttgcaggatctgtgtagtaactgcccagctggtacattctgtgataataacaggagtcagatttgcagtccctgtcctccaaatagtttctccagcgcaggtggacaaaggacctgtgacatatgcaggcagtgtaaaggtgttttcaagaccaggaaggagtgttcctccaccagcaatgcagagtgtgactgcatttcagggtatcactgcctgggggcagagtgcagcatgtgtgaacaggattgtaaacaaggtcaagaattgacaaaaaaaggttgtaaagactgttgctttgggacatttaatgaccagaaacgtggcatctgtcgcccctggacaaactgttctttggatggaaagtctgtgcttgtgaatgggacgaaggagagggacgtggtctgcggaccatctccagccgacctctctccaggagcatcctctgcgaccccgcctgcccctgcgagagagccaggacactctccgcaggtcgacgaacagttatattttcagggcggctcacccaaatctgcagacaaaactcacacatgcccaccgtgcccagcacctgaactcctggggggaccgtcagtcttcctcttccccccaaaacccaaggacaccctcatgatctcccggacccctgaggtcacatgcgtggtggtggacgtgagccacgaagaccctgaggtcaagttcaactggtacgtggacggcgtggaggtgcataatgccaagacaaagccgcgggaggagcagtacaacagcacgtaccgtgtggtcagcgtcctcaccgtcctgcaccaggactggctgaatggcaaggagtacaagtgcaaggtctccaacaaagccctcccagcccccatcgagaaaaccatctccaaagccaaagggcagccccgagaaccacaggtgtacaccctgcccccatgccgggatgagctgaccaagaaccaggtcagcctgtggtgcctggtcaaaggcttctatcccagcgacatcgccgtggagtgggagagcaatgggcagccggagaacaactacaagaccacgcctcccgtgctggactccgacggctccttcttcctctacagcaagctcaccgtggacaagagcaggtggcagcaggggaacgtcttctcatgctccgtgatgcatgaggctctgcacaaccactacacgcagaagagcctctccctgtctccgggtaaatccggaggcctgaacgacatcttcgaggcccagaagattgaatggcacgag

SEQ ID NO: 244 - DNA, 1269 bp, Artificial Sequence
  Nucleotide sequence of murine 4-1BB antigen Fc knob chain
gtgcagaacagctgcgacaactgccagcccggcaccttctgccggaagtacaaccccgtgtgcaagagctgcccccccagcaccttcagcagcatcggcggccagcccaactgcaacatctgcagagtgtgcgccggctacttccggttcaagaagttctgcagcagcacccacaacgccgagtgcgagtgcatcgagggcttccactgcctgggcccccagtgcaccagatgcgagaaggactgcagacccggccaggaactgaccaagcagggctgtaagacctgcagcctgggcaccttcaacgaccagaacgggaccggcgtgtgccggccttggaccaattgcagcctggacgggagaagcgtgctgaaaaccggcaccaccgagaaggacgtcgtgtgcggccctcccgtggtgtccttcagccctagcaccaccatcagcgtgacccctgaaggcggccctggcggacactctctgcaggtcctggtcgacgaacagttatattttcagggcggctcacccaaatctgcagacaaaactcacacatgcccaccgtgcccagcacctgaactcctggggggaccgtcagtcttcctcttccccccaaaacccaaggacaccctcatgatctcccggacccctgaggtcacatgcgtggtggtggacgtgagccacgaagaccctgaggtcaagttcaactggtacgtggacggcgtggaggtgcataatgccaagacaaagccgcgggaggagcagtacaacagcacgtaccgtgtggtcagcgtcctcaccgtcctgcaccaggactggctgaatggcaaggagtacaagtgcaaggtctccaacaaagccctcccagcccccatcgagaaaaccatctccaaagccaaagggcagccccgagaaccacaggtgtacaccctgcccccatgccgggatgagctgaccaagaaccaggtcagcctgtggtgcctggtcaaaggcttctatcccagcgacatcgccgtggagtgggagagcaatgggcagccggagaacaactacaagaccacgcctcccgtgctggactccgacggctccttcttcctctacagcaagctcaccgtggacaagagcaggtggcagcaggggaacgtcttctcatgctccgtgatgcatgaggctctgcacaaccactacacgcagaagagcctctccctgtctccgggtaaatccggaggcctgaacgacatcttcgaggcccagaagattgaatggcacgag

SEQ ID NO: 245 - protein, 422 aa, Artificial Sequence
  human 4-1BB antigen Fc knob chain
LQDPCSNCPAGTFCDNNRNQICSPCPPNSFSSAGGQRTCDICRQCKGVFRTRKECSSTSNAECDCTPGFHCLGAGCSMCEQDCKQGQELTKKGCKDCCFGTFNDQKRGICRPWTNCSLDGKSVLVNGTKERDVVCGPSPADLSPGASSVTPPAPAREPGHSPQVDEQLYFQGGSPKSADKTHTCPPCPAPELLGGPSVFLFPPKPKDTLMISRTPEVTCVVVDVSHEDPEVKFNWYVDGVEVHNAKTKPREEQYNSTYRVVSVLTVLHQDWLNGKEYKCKVSNKALPAPIEKTISKAKGQPREPQVYTLPPCRDELTKNQVSLWCLVKGFYPSDIAVEWESNGQPENNYKTTPPVLDSDGSFFLYSKLTVDKSRWQQGNVFSCSVMHEALHNHYTQKSLSLSPGKSGGLNDIFEAQKIEWHE

SEQ ID NO: 246 - protein, 422 aa, Artificial Sequence
  cynomolgus 4-1BB antigen Fc knob chain
LQDLCSNCPAGTFCDNNRSQICSPCPPNSFSSAGGQRTCDICRQCKGVFKTRKECSSTSNAECDCISGYHCLGAECSMCEQDCKQGQELTKKGCKDCCFGTFNDQKRGICRPWTNCSLDGKSVLVNGTKERDVVCGPSPADLSPGASSATPPAPAREPGHSPQVDEQLYFQGGSPKSADKTHTCPPCPAPELLGGPSVFLFPPKPKDTLMISRTPEVTCVVVDVSHEDPEVKFNWYVDGVEVHNAKTKPREEQYNSTYRVVSVLTVLHQDWLNGKEYKCKVSNKALPAPIEKTISKAKGQPREPQVYTLPPCRDELTKNQVSLWCLVKGFYPSDIAVEWESNGQPENNYKTTPPVLDSDGSFFLYSKLTVDKSRWQQGNVFSCSVMHEALHNHYTQKSLSLSPGKSGGLNDIFEAQKIEWHE

SEQ ID NO: 247 - protein, 423 aa, Artificial Sequence
  murine 4-1BB antigen Fc knob chain
VQNSCDNCQPGTFCRKYNPVCKSCPPSTFSSIGGQPNCNICRVCAGYFRFKKFCSSTHNAECECIEGFHCLGPQCTRCEKDCRPGQELTKQGCKTCSLGTFNDQNGTGVCRPWTNCSLDGRSVLKTGTTEKDVVCGPPVVSFSPSTTISVTPEGGPGGHSLQVLVDEQLYFQGGSPKSADKTHTCPPCPAPELLGGPSVFLFPPKPKDTLMISRTPEVTCVVVDVSHEDPEVKFNWYVDGVEVHNAKTKPREEQYNSTYRVVSVLTVLHQDWLNGKEYKCKVSNKALPAPIEKTISKAKGQPREPQVYTLPPCRDELTKNQVSLWCLVKGFYPSDIAVEWESNGQPENNYKTTPPVLDSDGSFFLYSKLTVDKSRWQQGNVFSCSVMHEALHNHYTQKSLSLSPGKSGGLNDIFEAQKIEWHE

SEQ ID NO: 248 - DNA, 28 bp, Artificial Sequence
  MS63 primer
tttcgcacagtaatatacggccgtgtcc

SEQ ID NO: 249 - protein, 5 aa, Artificial Sequence
  4-1BB(12B3,11D5, 9B11, 20G2)  CDR-H1
SYAIS

SEQ ID NO: 250 - protein, 5 aa, Artificial Sequence
  4-1BB(25G7)  CDR-H1
SYAMS

SEQ ID NO: 251 - protein, 17 aa, Artificial Sequence
  4-1BB(12B3,11D5, 9B11, 20G2)  CDR-H2
GIIPIFGTANYAQKFQG

SEQ ID NO: 252 - protein, 17 aa, Artificial Sequence
  4-1BB(25G7)  CDR-H2
AISGSGGSTYYADSVKG

SEQ ID NO: 253 - protein, 11 aa, Artificial Sequence
  4-1BB(12B3)  CDR-H3
SEFRFYADFDY

SEQ ID NO: 254 - protein, 9 aa, Artificial Sequence
  4-1BB(25G7)  CDR-H3
DDPWPPFDY

SEQ ID NO: 255 - protein, 10 aa, Artificial Sequence
  4-1BB(11D5)  CDR-H3
STLIYGYFDY

SEQ ID NO: 256 - protein, 11 aa, Artificial Sequence
  4-1BB(9B11)  CDR-H3
SSGAYPGYFDY

SEQ ID NO: 257 - protein, 11 aa, Artificial Sequence
  4-1BB(20G2)  CDR-H3
SYYWESYPFDY

SEQ ID NO: 258 - protein, 11 aa, Artificial Sequence
  4-1BB(12B3,11D5, 9B11, 20G2)  CDR-L1
RASQSISSWLA

SEQ ID NO: 259 - protein, 11 aa, Artificial Sequence
  4-1BB(25G7)  CDR-L1
QGDSLRSYYAS

SEQ ID NO: 260 - protein, 7 aa, Artificial Sequence
  4-1BB(12B3,11D5, 9B11, 20G2)  CDR-L2
DASSLES

SEQ ID NO: 261 - protein, 7 aa, Artificial Sequence
  4-1BB(25G7)  CDR-L2
GKNNRPS

SEQ ID NO: 262 - protein, 9 aa, Artificial Sequence
  4-1BB(12B3)  CDR-L3
QQYHSYPQT

SEQ ID NO: 263 - protein, 10 aa, Artificial Sequence
  4-1BB(25G7)  CDR-L3
NSLDRRGMWV

SEQ ID NO: 264 - protein, 9 aa, Artificial Sequence
  4-1BB(11D5)  CDR-L3
QQLNSYPQT

SEQ ID NO: 265 - protein, 9 aa, Artificial Sequence
  4-1BB(9B11)  CDR-L3
QQVNSYPQT

SEQ ID NO: 266 - protein, 8 aa, Artificial Sequence
  4-1BB(20G2)  CDR-L3
QQQHSYYT

SEQ ID NO: 267 - protein, 120 aa, Artificial Sequence
  4-1BB(12B3)  VH
QVQLVQSGAEVKKPGSSVKVSCKASGGTFSSYAISWVRQAPGQGLEWMGGIIPIFGTANYAQKFQGRVTITADKSTSTAYMELSSLRSEDTAVYYCARSEFRFYADFDYWGQGTTVTVSS

SEQ ID NO: 268 - protein, 107 aa, Artificial Sequence
  4-1BB(12B3)  VL
DIQMTQSPSTLSASVGDRVTITCRASQSISSWLAWYQQKPGKAPKLLIYDASSLESGVPSRFSGSGSGTEFTLTISSLQPDDFATYYCQQYHSYPQTFGQGTKVEIK

SEQ ID NO: 269 - protein, 118 aa, Artificial Sequence
  4-1BB(25G7)  VH
EVQLLESGGGLVQPGGSLRLSCAASGFTFSSYAMSWVRQAPGKGLEWVSAISGSGGSTYYADSVKGRFTISRDNSKNTLYLQMNSLRAEDTAVYYCARDDPWPPFDYWGQGTLVTVSS

SEQ ID NO: 270 - protein, 106 aa, Artificial Sequence
  4-1BB(25G7)  VL
SSELTQDPAVSVALGQTVRITCQGDSLRSYYASWYQQKPGQAPVLVIYGKNNRPSGIPDRFSGSSSGNTASLTITGAQAEDEADYYCNSLDRRGMWVFGGGTKLTV

SEQ ID NO: 271 - protein, 119 aa, Artificial Sequence
  4-1BB(11D5)  VH
QVQLVQSGAEVKKPGSSVKVSCKASGGTFSSYAISWVRQAPGQGLEWMGGIIPIFGTANYAQKFQGRVTITADKSTSTAYMELSSLRSEDTAVYYCARSTLIYGYFDYWGQGTTVTVSS

SEQ ID NO: 272 - protein, 107 aa, Artificial Sequence
  4-1BB(11D5)  VL
DIQMTQSPSTLSASVGDRVTITCRASQSISSWLAWYQQKPGKAPKLLIYDASSLESGVPSRFSGSGSGTEFTLTISSLQPDDFATYYCQQLNSYPQTFGQGTKVEIK

SEQ ID NO: 273 - protein, 120 aa, Artificial Sequence
  4-1BB(9B11)  VH
QVQLVQSGAEVKKPGSSVKVSCKASGGTFSSYAISWVRQAPGQGLEWMGGIIPIFGTANYAQKFQGRVTITADKSTSTAYMELSSLRSEDTAVYYCARSSGAYPGYFDYWGQGTTVTVSS

SEQ ID NO: 274 - protein, 107 aa, Artificial Sequence
  4-1BB(9B11)  VL
DIQMTQSPSTLSASVGDRVTITCRASQSISSWLAWYQQKPGKAPKLLIYDASSLESGVPSRFSGSGSGTEFTLTISSLQPDDFATYYCQQVNSYPQTFGQGTKVEIK

SEQ ID NO: 275 - protein, 120 aa, Artificial Sequence
  4-1BB(20G2)  VH
QVQLVQSGAEVKKPGSSVKVSCKASGGTFSSYAISWVRQAPGQGLEWMGGIIPIFGTANYAQKFQGRVTITADKSTSTAYMELSSLRSEDTAVYYCARSYYWESYPFDYWGQGTTVTVSS

SEQ ID NO: 276 - protein, 106 aa, Artificial Sequence
  4-1BB(20G2)  VL
DIQMTQSPSTLSASVGDRVTITCRASQSISSWLAWYQQKPGKAPKLLIYDASSLESGVPSRFSGSGSGTEFTLTISSLQPDDFATYYCQQQHSYYTFGQGTKVEIK

SEQ ID NO: 277 - DNA, 321 bp, Artificial Sequence
  DNA 4-1BB(12B3)  VL
gacatccagatgacccagtctccttccaccctgtctgcatctgtaggagaccgtgtcaccatcacttgccgtgccagtcagagtattagtagctggttggcctggtatcagcagaaaccagggaaagcccctaagctcctgatctatgatgcctccagtttggaaagtggggtcccatcacgtttcagcggcagtggatccgggacagaattcactctcaccatcagcagcttgcagcctgatgattttgcaacttattactgccaacagtatcattcgtatccgcagacgtttggccagggcaccaaagtcgagatcaag

SEQ ID NO: 278 - DNA, 360 bp, Artificial Sequence
  DNA 4-1BB(12B3)  VH
caggtgcaattggtgcagtctggggctgaggtgaagaagcctgggtcctcggtgaaggtctcctgcaaggcctccggaggcacattcagcagctacgctataagctgggtgcgacaggcccctggacaagggctcgagtggatgggagggatcatccctatctttggtacagcaaactacgcacagaagttccagggcagggtcaccattactgcagacaaatccacgagcacagcctacatggagctgagcagcctgagatctgaggacaccgccgtgtattactgtgcgagatctgaattccgtttctacgctgacttcgactactggggccaagggaccaccgtgaccgtctcctca

SEQ ID NO: 279 - DNA, 318 bp, Artificial Sequence
  DNA 4-1BB(25G7)  VL
tcgtctgagctgactcaggaccctgctgtgtctgtggccttgggacagacagtcaggatcacatgccaaggagacagcctcagaagttattatgcaagctggtaccagcagaagccaggacaggcccctgtacttgtcatctatggtaaaaacaaccggccctcagggatcccagaccgattctctggctccagctcaggaaacacagcttccttgaccatcactggggctcaggcggaagatgaggctgactattactgtaactcccttgataggcgcggtatgtgggtattcggcggagggaccaagctgaccgtc

SEQ ID NO: 280 - DNA, 354 bp, Artificial Sequence
  DNA 4-1BB(25G7)  VH
gaggtgcaattgttggagtctgggggaggcttggtacagcctggggggtccctgagactctcctgtgcagcctccggattcacctttagcagttatgccatgagctgggtccgccaggctccagggaaggggctggagtgggtctcagctattagtggtagtggtggtagcacatactacgcagactccgtgaagggccggttcaccatctccagagacaattccaagaacacgctgtatctgcagatgaacagcctgagagccgaggacacggccgtatattactgtgcgcgtgacgacccgtggccgccgttcgactactggggccaaggaaccctggtcaccgtctcgagt

SEQ ID NO: 281 - DNA, 321 bp, Artificial Sequence
  DNA 4-1BB(11D5)  VL
gacatccagatgacccagtctccttccaccctgtctgcatctgtaggagaccgtgtcaccatcacttgccgtgccagtcagagtattagtagctggttggcctggtatcagcagaaaccagggaaagcccctaagctcctgatctatgatgcctccagtttggaaagtggggtcccatcacgtttcagcggcagtggatccgggacagaattcactctcaccatcagcagcttgcagcctgatgattttgcaacttattactgccaacagcttaattcgtatcctcagacgtttggccagggcaccaaagtcgagatcaag

SEQ ID NO: 282 - DNA, 357 bp, Artificial Sequence
  DNA 4-1BB(11D5)  VH
caggtgcaattggtgcagtctggggctgaggtgaagaagcctgggtcctcggtgaaggtctcctgcaaggcctccggaggcacattcagcagctacgctataagctgggtgcgacaggcccctggacaagggctcgagtggatgggagggatcatccctatctttggtacagcaaactacgcacagaagttccagggcagggtcaccattactgcagacaaatccacgagcacagcctacatggagctgagcagcctgagatctgaggacaccgccgtgtattactgtgcgagatctactctgatctacggttacttcgactactggggccaagggaccaccgtgaccgtctcctca

SEQ ID NO: 283 - DNA, 321 bp, Artificial Sequence
  DNA 4-1BB(9B11)  VL
gacatccagatgacccagtctccttccaccctgtctgcatctgtaggagaccgtgtcaccatcacttgccgtgccagtcagagtattagtagctggttggcctggtatcagcagaaaccagggaaagcccctaagctcctgatctatgatgcctccagtttggaaagtggggtcccatcacgtttcagcggcagtggatccgggacagaattcactctcaccatcagcagcttgcagcctgatgattttgcaacttattactgccaacaggttaattcttatccgcagacgtttggccagggcaccaaagtcgagatcaag

SEQ ID NO: 284 - DNA, 360 bp, Artificial Sequence
  DNA 4-1BB(9B11)  VH
caggtgcaattggtgcagtctggggctgaggtgaagaagcctgggtcctcggtgaaggtctcctgcaaggcctccggaggcacattcagcagctacgctataagctgggtgcgacaggcccctggacaagggctcgagtggatgggagggatcatccctatctttggtacagcaaactacgcacagaagttccagggcagggtcaccattactgcagacaaatccacgagcacagcctacatggagctgagcagcctgagatctgaggacaccgccgtgtattactgtgcgagatcttctggtgcttacccgggttacttcgactactggggccaagggaccaccgtgaccgtctcctca

SEQ ID NO: 285 - DNA, 318 bp, Artificial Sequence
  DNA 4-1BB(20G2)  VL
gacatccagatgacccagtctccatccaccctgtctgcatctgtaggagaccgtgtcaccatcacttgccgtgccagtcagagtattagtagctggttggcctggtatcagcagaaaccagggaaagcccctaagctcctgatctatgatgcctccagtttggaaagtggggtcccatcacgtttcagcggcagtggatccgggacagaattcactctcaccatcagcagcttgcagcctgatgattttgcaacttattactgccaacagcagcactcgtattatacgtttggccagggcaccaaagtcgagatcaag

SEQ ID NO: 286 - DNA, 360 bp, Artificial Sequence
  DNA 4-1BB(20G2)  VH
caggtgcaattggtgcagtctggggctgaggtgaagaagcctgggtcctcggtgaaggtctcctgcaaggcctccggaggcacattcagcagctacgctataagctgggtgcgacaggcccctggacaagggctcgagtggatgggagggatcatccctatctttggtacagcaaactacgcacagaagttccagggcagggtcaccattactgcagacaaatccacgagcacagcctacatggagctgagcagcctgagatctgaggacaccgccgtgtattactgtgcgagatcttactactgggaatcttacccgttcgactactggggccaagggaccaccgtgaccgtctccagc

SEQ ID NO: 287 - DNA, 642 bp, Artificial Sequence
  DNA 12B3 P329GLALA IgG1 light chain
gacatccagatgacccagtctccttccaccctgtctgcatctgtaggagaccgtgtcaccatcacttgccgtgccagtcagagtattagtagctggttggcctggtatcagcagaaaccagggaaagcccctaagctcctgatctatgatgcctccagtttggaaagtggggtcccatcacgtttcagcggcagtggatccgggacagaattcactctcaccatcagcagcttgcagcctgatgattttgcaacttattactgccaacagtatcattcgtatccgcagacgtttggccagggcaccaaagtcgagatcaagcgtacggtggctgcaccatctgtcttcatcttcccgccatctgatgagcagttgaaatctggaactgcctctgttgtgtgcctgctgaataacttctatcccagagaggccaaagtacagtggaaggtggataacgccctccaatcgggtaactcccaggagagtgtcacagagcaggacagcaaggacagcacctacagcctcagcagcaccctgacgctgagcaaagcagactacgagaaacacaaagtctacgcctgcgaagtcacccatcagggcctgagctcgcccgtcacaaagagcttcaacaggggagagtgt

SEQ ID NO: 288 - DNA, 1350 bp, Artificial Sequence
  DNA 12B3 P329GLALA IgG1 heavy chain
caggtgcaattggtgcagtctggggctgaggtgaagaagcctgggtcctcggtgaaggtctcctgcaaggcctccggaggcacattcagcagctacgctataagctgggtgcgacaggcccctggacaagggctcgagtggatgggagggatcatccctatctttggtacagcaaactacgcacagaagttccagggcagggtcaccattactgcagacaaatccacgagcacagcctacatggagctgagcagcctgagatctgaggacaccgccgtgtattactgtgcgagatctgaattccgtttctacgctgacttcgactactggggccaagggaccaccgtgaccgtctcctcagctagcaccaagggcccatcggtcttccccctggcaccctcctccaagagcacctctgggggcacagcggccctgggctgcctggtcaaggactacttccccgaaccggtgacggtgtcgtggaactcaggcgccctgaccagcggcgtgcacaccttcccggctgtcctacagtcctcaggactctactccctcagcagcgtggtgaccgtgccctccagcagcttgggcacccagacctacatctgcaacgtgaatcacaagcccagcaacaccaaggtggacaagaaagttgagcccaaatcttgtgacaaaactcacacatgcccaccgtgcccagcacctgaagctgcagggggaccgtcagtcttcctcttccccccaaaacccaaggacaccctcatgatctcccggacccctgaggtcacatgcgtggtggtggacgtgagccacgaagaccctgaggtcaagttcaactggtacgtggacggcgtggaggtgcataatgccaagacaaagccgcgggaggagcagtacaacagcacgtaccgtgtggtcagcgtcctcaccgtcctgcaccaggactggctgaatggcaaggagtacaagtgcaaggtctccaacaaagccctcggcgcccccatcgagaaaaccatctccaaagccaaagggcagccccgagaaccacaggtgtacaccctgcccccatcccgggatgagctgaccaagaaccaggtcagcctgacctgcctggtcaaaggcttctatcccagcgacatcgccgtggagtgggagagcaatgggcagccggagaacaactacaagaccacgcctcccgtgctggactccgacggctccttcttcctctacagcaagctcaccgtggacaagagcaggtggcagcaggggaacgtcttctcatgctccgtgatgcatgaggctctgcacaaccactacacgcagaagagcctctccctgtctccgggtaaa

SEQ ID NO: 289 - protein, 214 aa, Artificial Sequence
  12B3 P329GLALA IgG1 light chain
DIQMTQSPSTLSASVGDRVTITCRASQSISSWLAWYQQKPGKAPKLLIYDASSLESGVPSRFSGSGSGTEFTLTISSLQPDDFATYYCQQYHSYPQTFGQGTKVEIKRTVAAPSVFIFPPSDEQLKSGTASVVCLLNNFYPREAKVQWKVDNALQSGNSQESVTEQDSKDSTYSLSSTLTLSKADYEKHKVYACEVTHQGLSSPVTKSFNRGEC

SEQ ID NO: 290 - protein, 450 aa, Artificial Sequence
  12B3 P329GLALA IgG1 heavy chain
QVQLVQSGAEVKKPGSSVKVSCKASGGTFSSYAISWVRQAPGQGLEWMGGIIPIFGTANYAQKFQGRVTITADKSTSTAYMELSSLRSEDTAVYYCARSEFRFYADFDYWGQGTTVTVSSASTKGPSVFPLAPSSKSTSGGTAALGCLVKDYFPEPVTVSWNSGALTSGVHTFPAVLQSSGLYSLSSVVTVPSSSLGTQTYICNVNHKPSNTKVDKKVEPKSCDKTHTCPPCPAPEAAGGPSVFLFPPKPKDTLMISRTPEVTCVVVDVSHEDPEVKFNWYVDGVEVHNAKTKPREEQYNSTYRVVSVLTVLHQDWLNGKEYKCKVSNKALGAPIEKTISKAKGQPREPQVYTLPPSRDELTKNQVSLTCLVKGFYPSDIAVEWESNGQPENNYKTTPPVLDSDGSFFLYSKLTVDKSRWQQGNVFSCSVMHEALHNHYTQKSLSLSPGK

SEQ ID NO: 291 - DNA, 639 bp, Artificial Sequence
  DNA 25G7 P329GLALA IgG1 light chain
tcgtctgagctgactcaggaccctgctgtgtctgtggccttgggacagacagtcaggatcacatgccaaggagacagcctcagaagttattatgcaagctggtaccagcagaagccaggacaggcccctgtacttgtcatctatggtaaaaacaaccggccctcagggatcccagaccgattctctggctccagctcaggaaacacagcttccttgaccatcactggggctcaggcggaagatgaggctgactattactgtaactcccttgataggcgcggtatgtgggtattcggcggagggaccaagctgaccgtcctaggtcaacccaaggctgcccccagcgtgaccctgttcccccccagcagcgaggaactgcaggccaacaaggccaccctggtctgcctgatcagcgacttctacccaggcgccgtgaccgtggcctggaaggccgacagcagccccgtgaaggccggcgtggagaccaccacccccagcaagcagagcaacaacaagtacgccgccagcagctacctgagcctgacccccgagcagtggaagagccacaggtcctacagctgccaggtgacccacgagggcagcaccgtggagaaaaccgtggcccccaccgagtgcagc

SEQ ID NO: 292 - DNA, 1344 bp, Artificial Sequence
  DNA 25G7 P329GLALA IgG1 heavy chain
gaggtgcaattgttggagtctgggggaggcttggtacagcctggggggtccctgagactctcctgtgcagcctccggattcacctttagcagttatgccatgagctgggtccgccaggctccagggaaggggctggagtgggtctcagctattagtggtagtggtggtagcacatactacgcagactccgtgaagggccggttcaccatctccagagacaattccaagaacacgctgtatctgcagatgaacagcctgagagccgaggacacggccgtatattactgtgcgcgtgacgacccgtggccgccgttcgactactggggccaaggaaccctggtcaccgtctcgagtgctagcaccaagggcccatcggtcttccccctggcaccctcctccaagagcacctctgggggcacagcggccctgggctgcctggtcaaggactacttccccgaaccggtgacggtgtcgtggaactcaggcgccctgaccagcggcgtgcacaccttcccggctgtcctacagtcctcaggactctactccctcagcagcgtggtgaccgtgccctccagcagcttgggcacccagacctacatctgcaacgtgaatcacaagcccagcaacaccaaggtggacaagaaagttgagcccaaatcttgtgacaaaactcacacatgcccaccgtgcccagcacctgaagctgcagggggaccgtcagtcttcctcttccccccaaaacccaaggacaccctcatgatctcccggacccctgaggtcacatgcgtggtggtggacgtgagccacgaagaccctgaggtcaagttcaactggtacgtggacggcgtggaggtgcataatgccaagacaaagccgcgggaggagcagtacaacagcacgtaccgtgtggtcagcgtcctcaccgtcctgcaccaggactggctgaatggcaaggagtacaagtgcaaggtctccaacaaagccctcggcgcccccatcgagaaaaccatctccaaagccaaagggcagccccgagaaccacaggtgtacaccctgcccccatcccgggatgagctgaccaagaaccaggtcagcctgacctgcctggtcaaaggcttctatcccagcgacatcgccgtggagtgggagagcaatgggcagccggagaacaactacaagaccacgcctcccgtgctggactccgacggctccttcttcctctacagcaagctcaccgtggacaagagcaggtggcagcaggggaacgtcttctcatgctccgtgatgcatgaggctctgcacaaccactacacgcagaagagcctctccctgtctccgggtaaa

SEQ ID NO: 293 - protein, 213 aa, Artificial Sequence
  25G7 P329GLALA IgG1 light chain
SSELTQDPAVSVALGQTVRITCQGDSLRSYYASWYQQKPGQAPVLVIYGKNNRPSGIPDRFSGSSSGNTASLTITGAQAEDEADYYCNSLDRRGMWVFGGGTKLTVLGQPKAAPSVTLFPPSSEELQANKATLVCLISDFYPGAVTVAWKADSSPVKAGVETTTPSKQSNNKYAASSYLSLTPEQWKSHRSYSCQVTHEGSTVEKTVAPTECS

SEQ ID NO: 294 - protein, 448 aa, Artificial Sequence
  25G7 P329GLALA IgG1 heavy chain
EVQLLESGGGLVQPGGSLRLSCAASGFTFSSYAMSWVRQAPGKGLEWVSAISGSGGSTYYADSVKGRFTISRDNSKNTLYLQMNSLRAEDTAVYYCARDDPWPPFDYWGQGTLVTVSSASTKGPSVFPLAPSSKSTSGGTAALGCLVKDYFPEPVTVSWNSGALTSGVHTFPAVLQSSGLYSLSSVVTVPSSSLGTQTYICNVNHKPSNTKVDKKVEPKSCDKTHTCPPCPAPEAAGGPSVFLFPPKPKDTLMISRTPEVTCVVVDVSHEDPEVKFNWYVDGVEVHNAKTKPREEQYNSTYRVVSVLTVLHQDWLNGKEYKCKVSNKALGAPIEKTISKAKGQPREPQVYTLPPSRDELTKNQVSLTCLVKGFYPSDIAVEWESNGQPENNYKTTPPVLDSDGSFFLYSKLTVDKSRWQQGNVFSCSVMHEALHNHYTQKSLSLSPGK

SEQ ID NO: 295 - DNA, 642 bp, Artificial Sequence
  DNA 11D5 P329GLALA IgG1 light chain
gacatccagatgacccagtctccttccaccctgtctgcatctgtaggagaccgtgtcaccatcacttgccgtgccagtcagagtattagtagctggttggcctggtatcagcagaaaccagggaaagcccctaagctcctgatctatgatgcctccagtttggaaagtggggtcccatcacgtttcagcggcagtggatccgggacagaattcactctcaccatcagcagcttgcagcctgatgattttgcaacttattactgccaacagcttaattcgtatcctcagacgtttggccagggcaccaaagtcgagatcaagcgtacggtggctgcaccatctgtcttcatcttcccgccatctgatgagcagttgaaatctggaactgcctctgttgtgtgcctgctgaataacttctatcccagagaggccaaagtacagtggaaggtggataacgccctccaatcgggtaactcccaggagagtgtcacagagcaggacagcaaggacagcacctacagcctcagcagcaccctgacgctgagcaaagcagactacgagaaacacaaagtctacgcctgcgaagtcacccatcagggcctgagctcgcccgtcacaaagagcttcaacaggggagagtgt

SEQ ID NO: 296 - DNA, 1347 bp, Artificial Sequence
  DNA 11D5 P329GLALA IgG1 heavy chain
caggtgcaattggtgcagtctggggctgaggtgaagaagcctgggtcctcggtgaaggtctcctgcaaggcctccggaggcacattcagcagctacgctataagctgggtgcgacaggcccctggacaagggctcgagtggatgggagggatcatccctatctttggtacagcaaactacgcacagaagttccagggcagggtcaccattactgcagacaaatccacgagcacagcctacatggagctgagcagcctgagatctgaggacaccgccgtgtattactgtgcgagatctactctgatctacggttacttcgactactggggccaagggaccaccgtgaccgtctcctcagctagcaccaagggcccatcggtcttccccctggcaccctcctccaagagcacctctgggggcacagcggccctgggctgcctggtcaaggactacttccccgaaccggtgacggtgtcgtggaactcaggcgccctgaccagcggcgtgcacaccttcccggctgtcctacagtcctcaggactctactccctcagcagcgtggtgaccgtgccctccagcagcttgggcacccagacctacatctgcaacgtgaatcacaagcccagcaacaccaaggtggacaagaaagttgagcccaaatcttgtgacaaaactcacacatgcccaccgtgcccagcacctgaagctgcagggggaccgtcagtcttcctcttccccccaaaacccaaggacaccctcatgatctcccggacccctgaggtcacatgcgtggtggtggacgtgagccacgaagaccctgaggtcaagttcaactggtacgtggacggcgtggaggtgcataatgccaagacaaagccgcgggaggagcagtacaacagcacgtaccgtgtggtcagcgtcctcaccgtcctgcaccaggactggctgaatggcaaggagtacaagtgcaaggtctccaacaaagccctcggcgcccccatcgagaaaaccatctccaaagccaaagggcagccccgagaaccacaggtgtacaccctgcccccatcccgggatgagctgaccaagaaccaggtcagcctgacctgcctggtcaaaggcttctatcccagcgacatcgccgtggagtgggagagcaatgggcagccggagaacaactacaagaccacgcctcccgtgctggactccgacggctccttcttcctctacagcaagctcaccgtggacaagagcaggtggcagcaggggaacgtcttctcatgctccgtgatgcatgaggctctgcacaaccactacacgcagaagagcctctccctgtctccgggtaaa

SEQ ID NO: 297 - protein, 214 aa, Artificial Sequence
  11D5 P329GLALA IgG1 light chain
DIQMTQSPSTLSASVGDRVTITCRASQSISSWLAWYQQKPGKAPKLLIYDASSLESGVPSRFSGSGSGTEFTLTISSLQPDDFATYYCQQLNSYPQTFGQGTKVEIKRTVAAPSVFIFPPSDEQLKSGTASVVCLLNNFYPREAKVQWKVDNALQSGNSQESVTEQDSKDSTYSLSSTLTLSKADYEKHKVYACEVTHQGLSSPVTKSFNRGEC

SEQ ID NO: 298 - protein, 449 aa, Artificial Sequence
  11D5 P329GLALA IgG1 heavy chain
QVQLVQSGAEVKKPGSSVKVSCKASGGTFSSYAISWVRQAPGQGLEWMGGIIPIFGTANYAQKFQGRVTITADKSTSTAYMELSSLRSEDTAVYYCARSTLIYGYFDYWGQGTTVTVSSASTKGPSVFPLAPSSKSTSGGTAALGCLVKDYFPEPVTVSWNSGALTSGVHTFPAVLQSSGLYSLSSVVTVPSSSLGTQTYICNVNHKPSNTKVDKKVEPKSCDKTHTCPPCPAPEAAGGPSVFLFPPKPKDTLMISRTPEVTCVVVDVSHEDPEVKFNWYVDGVEVHNAKTKPREEQYNSTYRVVSVLTVLHQDWLNGKEYKCKVSNKALGAPIEKTISKAKGQPREPQVYTLPPSRDELTKNQVSLTCLVKGFYPSDIAVEWESNGQPENNYKTTPPVLDSDGSFFLYSKLTVDKSRWQQGNVFSCSVMHEALHNHYTQKSLSLSPGK

SEQ ID NO: 299 - DNA, 642 bp, Artificial Sequence
  DNA 9B11 P329GLALA IgG1 light chain
gacatccagatgacccagtctccttccaccctgtctgcatctgtaggagaccgtgtcaccatcacttgccgtgccagtcagagtattagtagctggttggcctggtatcagcagaaaccagggaaagcccctaagctcctgatctatgatgcctccagtttggaaagtggggtcccatcacgtttcagcggcagtggatccgggacagaattcactctcaccatcagcagcttgcagcctgatgattttgcaacttattactgccaacaggttaattcttatccgcagacgtttggccagggcaccaaagtcgagatcaagcgtacggtggctgcaccatctgtcttcatcttcccgccatctgatgagcagttgaaatctggaactgcctctgttgtgtgcctgctgaataacttctatcccagagaggccaaagtacagtggaaggtggataacgccctccaatcgggtaactcccaggagagtgtcacagagcaggacagcaaggacagcacctacagcctcagcagcaccctgacgctgagcaaagcagactacgagaaacacaaagtctacgcctgcgaagtcacccatcagggcctgagctcgcccgtcacaaagagcttcaacaggggagagtgt

SEQ ID NO: 300 - DNA, 1350 bp, Artificial Sequence
  DNA 9B11 P329GLALA IgG1 heavy chain
caggtgcaattggtgcagtctggggctgaggtgaagaagcctgggtcctcggtgaaggtctcctgcaaggcctccggaggcacattcagcagctacgctataagctgggtgcgacaggcccctggacaagggctcgagtggatgggagggatcatccctatctttggtacagcaaactacgcacagaagttccagggcagggtcaccattactgcagacaaatccacgagcacagcctacatggagctgagcagcctgagatctgaggacaccgccgtgtattactgtgcgagatcttctggtgcttacccgggttacttcgactactggggccaagggaccaccgtgaccgtctcctcagctagcaccaagggcccatcggtcttccccctggcaccctcctccaagagcacctctgggggcacagcggccctgggctgcctggtcaaggactacttccccgaaccggtgacggtgtcgtggaactcaggcgccctgaccagcggcgtgcacaccttcccggctgtcctacagtcctcaggactctactccctcagcagcgtggtgaccgtgccctccagcagcttgggcacccagacctacatctgcaacgtgaatcacaagcccagcaacaccaaggtggacaagaaagttgagcccaaatcttgtgacaaaactcacacatgcccaccgtgcccagcacctgaagctgcagggggaccgtcagtcttcctcttccccccaaaacccaaggacaccctcatgatctcccggacccctgaggtcacatgcgtggtggtggacgtgagccacgaagaccctgaggtcaagttcaactggtacgtggacggcgtggaggtgcataatgccaagacaaagccgcgggaggagcagtacaacagcacgtaccgtgtggtcagcgtcctcaccgtcctgcaccaggactggctgaatggcaaggagtacaagtgcaaggtctccaacaaagccctcggcgcccccatcgagaaaaccatctccaaagccaaagggcagccccgagaaccacaggtgtacaccctgcccccatcccgggatgagctgaccaagaaccaggtcagcctgacctgcctggtcaaaggcttctatcccagcgacatcgccgtggagtgggagagcaatgggcagccggagaacaactacaagaccacgcctcccgtgctggactccgacggctccttcttcctctacagcaagctcaccgtggacaagagcaggtggcagcaggggaacgtcttctcatgctccgtgatgcatgaggctctgcacaaccactacacgcagaagagcctctccctgtctccgggtaaa

SEQ ID NO: 301 - protein, 214 aa, Artificial Sequence
  9B11 P329GLALA IgG1 light chain
DIQMTQSPSTLSASVGDRVTITCRASQSISSWLAWYQQKPGKAPKLLIYDASSLESGVPSRFSGSGSGTEFTLTISSLQPDDFATYYCQQVNSYPQTFGQGTKVEIKRTVAAPSVFIFPPSDEQLKSGTASVVCLLNNFYPREAKVQWKVDNALQSGNSQESVTEQDSKDSTYSLSSTLTLSKADYEKHKVYACEVTHQGLSSPVTKSFNRGEC

SEQ ID NO: 302 - protein, 450 aa, Artificial Sequence
  9B11 P329GLALA IgG1 heavy chain
QVQLVQSGAEVKKPGSSVKVSCKASGGTFSSYAISWVRQAPGQGLEWMGGIIPIFGTANYAQKFQGRVTITADKSTSTAYMELSSLRSEDTAVYYCARSSGAYPGYFDYWGQGTTVTVSSASTKGPSVFPLAPSSKSTSGGTAALGCLVKDYFPEPVTVSWNSGALTSGVHTFPAVLQSSGLYSLSSVVTVPSSSLGTQTYICNVNHKPSNTKVDKKVEPKSCDKTHTCPPCPAPEAAGGPSVFLFPPKPKDTLMISRTPEVTCVVVDVSHEDPEVKFNWYVDGVEVHNAKTKPREEQYNSTYRVVSVLTVLHQDWLNGKEYKCKVSNKALGAPIEKTISKAKGQPREPQVYTLPPSRDELTKNQVSLTCLVKGFYPSDIAVEWESNGQPENNYKTTPPVLDSDGSFFLYSKLTVDKSRWQQGNVFSCSVMHEALHNHYTQKSLSLSPGK

SEQ ID NO: 303 - DNA, 639 bp, Artificial Sequence
  DNA 20G2 P329GLALA IgG1 light chain
gacatccagatgacccagtctccatccaccctgtctgcatctgtaggagaccgtgtcaccatcacttgccgtgccagtcagagtattagtagctggttggcctggtatcagcagaaaccagggaaagcccctaagctcctgatctatgatgcctccagtttggaaagtggggtcccatcacgtttcagcggcagtggatccgggacagaattcactctcaccatcagcagcttgcagcctgatgattttgcaacttattactgccaacagcagcactcgtattatacgtttggccagggcaccaaagtcgagatcaagcgtacggtggctgcaccatctgtcttcatcttcccgccatctgatgagcagttgaaatctggaactgcctctgttgtgtgcctgctgaataacttctatcccagagaggccaaagtacagtggaaggtggataacgccctccaatcgggtaactcccaggagagtgtcacagagcaggacagcaaggacagcacctacagcctcagcagcaccctgacgctgagcaaagcagactacgagaaacacaaagtctacgcctgcgaagtcacccatcagggcctgagctcgcccgtcacaaagagcttcaacaggggagagtgt

SEQ ID NO: 304 - DNA, 1350 bp, Artificial Sequence
  DNA 20G2 P329GLALA IgG1 heavy chain
caggtgcaattggtgcagtctggggctgaggtgaagaagcctgggtcctcggtgaaggtctcctgcaaggcctccggaggcacattcagcagctacgctataagctgggtgcgacaggcccctggacaagggctcgagtggatgggagggatcatccctatctttggtacagcaaactacgcacagaagttccagggcagggtcaccattactgcagacaaatccacgagcacagcctacatggagctgagcagcctgagatctgaggacaccgccgtgtattactgtgcgagatcttactactgggaatcttacccgttcgactactggggccaagggaccaccgtgaccgtctccagcgctagcaccaagggcccatcggtcttccccctggcaccctcctccaagagcacctctgggggcacagcggccctgggctgcctggtcaaggactacttccccgaaccggtgacggtgtcgtggaactcaggcgccctgaccagcggcgtgcacaccttcccggctgtcctacagtcctcaggactctactccctcagcagcgtggtgaccgtgccctccagcagcttgggcacccagacctacatctgcaacgtgaatcacaagcccagcaacaccaaggtggacaagaaagttgagcccaaatcttgtgacaaaactcacacatgcccaccgtgcccagcacctgaagctgcagggggaccgtcagtcttcctcttccccccaaaacccaaggacaccctcatgatctcccggacccctgaggtcacatgcgtggtggtggacgtgagccacgaagaccctgaggtcaagttcaactggtacgtggacggcgtggaggtgcataatgccaagacaaagccgcgggaggagcagtacaacagcacgtaccgtgtggtcagcgtcctcaccgtcctgcaccaggactggctgaatggcaaggagtacaagtgcaaggtctccaacaaagccctcggcgcccccatcgagaaaaccatctccaaagccaaagggcagccccgagaaccacaggtgtacaccctgcccccatcccgggatgagctgaccaagaaccaggtcagcctgacctgcctggtcaaaggcttctatcccagcgacatcgccgtggagtgggagagcaatgggcagccggagaacaactacaagaccacgcctcccgtgctggactccgacggctccttcttcctctacagcaagctcaccgtggacaagagcaggtggcagcaggggaacgtcttctcatgctccgtgatgcatgaggctctgcacaaccactacacgcagaagagcctctccctgtctccgggtaaa

SEQ ID NO: 305 - protein, 213 aa, Artificial Sequence
  20G2 P329GLALA IgG1 light chain
DIQMTQSPSTLSASVGDRVTITCRASQSISSWLAWYQQKPGKAPKLLIYDASSLESGVPSRFSGSGSGTEFTLTISSLQPDDFATYYCQQQHSYYTFGQGTKVEIKRTVAAPSVFIFPPSDEQLKSGTASVVCLLNNFYPREAKVQWKVDNALQSGNSQESVTEQDSKDSTYSLSSTLTLSKADYEKHKVYACEVTHQGLSSPVTKSFNRGEC

SEQ ID NO: 306 - protein, 450 aa, Artificial Sequence
  20G2 P329GLALA IgG1 heavy chain
QVQLVQSGAEVKKPGSSVKVSCKASGGTFSSYAISWVRQAPGQGLEWMGGIIPIFGTANYAQKFQGRVTITADKSTSTAYMELSSLRSEDTAVYYCARSYYWESYPFDYWGQGTTVTVSSASTKGPSVFPLAPSSKSTSGGTAALGCLVKDYFPEPVTVSWNSGALTSGVHTFPAVLQSSGLYSLSSVVTVPSSSLGTQTYICNVNHKPSNTKVDKKVEPKSCDKTHTCPPCPAPEAAGGPSVFLFPPKPKDTLMISRTPEVTCVVVDVSHEDPEVKFNWYVDGVEVHNAKTKPREEQYNSTYRVVSVLTVLHQDWLNGKEYKCKVSNKALGAPIEKTISKAKGQPREPQVYTLPPSRDELTKNQVSLTCLVKGFYPSDIAVEWESNGQPENNYKTTPPVLDSDGSFFLYSKLTVDKSRWQQGNVFSCSVMHEALHNHYTQKSLSLSPGK

SEQ ID NO: 307 - DNA, 2076 bp, Artificial Sequence
  DNA (12B3) VHCH1-Heavy chain-(28H1) VHCL
caggtgcaattggtgcagtctggggctgaggtgaagaagcctgggtcctcggtgaaggtctcctgcaaggcctccggaggcacattcagcagctacgctataagctgggtgcgacaggcccctggacaagggctcgagtggatgggagggatcatccctatctttggtacagcaaactacgcacagaagttccagggcagggtcaccattactgcagacaaatccacgagcacagcctacatggagctgagcagcctgagatctgaggacaccgccgtgtattactgtgcgagatctgaattccgtttctacgctgacttcgactactggggccaagggaccaccgtgaccgtctcctcagctagcaccaagggcccatccgtgttccctctggccccttccagcaagtctacctctggcggcacagccgctctgggctgcctcgtgaaggactacttccccgagcctgtgacagtgtcctggaactctggcgccctgacatccggcgtgcacacctttccagctgtgctgcagtcctccggcctgtactccctgtcctccgtcgtgacagtgccctccagctctctgggcacccagacctacatctgcaacgtgaaccacaagccctccaacaccaaggtggacaagaaggtggaacccaagtcctgcgacaagacccacacctgtcccccttgtcctgcccctgaagctgctggcggccctagcgtgttcctgttccccccaaagcccaaggacaccctgatgatctcccggacccccgaagtgacctgcgtggtggtggatgtgtcccacgaggaccctgaagtgaagttcaattggtacgtggacggcgtggaagtgcacaatgccaagaccaagcctagagaggaacagtacaactccacctaccgggtggtgtccgtgctgaccgtgctgcaccaggattggctgaacggcaaagagtacaagtgcaaggtgtccaacaaggccctgggagcccccatcgaaaagaccatctccaaggccaagggccagcctcgcgagcctcaggtgtacaccctgccccctagcagagatgagctgaccaagaaccaggtgtccctgacctgtctcgtgaaaggcttctacccctccgatatcgccgtggaatgggagagcaacggccagcccgagaacaactacaagaccaccccccctgtgctggactccgacggctcattcttcctgtactctaagctgacagtggacaagtcccggtggcagcagggcaacgtgttctcctgctccgtgatgcacgaggccctgcacaaccactacacccagaagtccctgtccctgtctcccgggggaggcggaggatctggcggaggcggatccggtggtggcggatctgggggcggtggatctgaggtgcagctgctggaatctgggggaggactggtgcagccaggcggatctctgaggctgtcctgcgctgcttccggctttaccttctccagccacgccatgagttgggtgcgccaggcacccggaaaaggactggaatgggtgtcagccatctgggcctccggcgagcagtactacgccgatagcgtgaagggccggttcaccatctctcgggataacagcaagaatactctgtacctgcagatgaactccctgcgcgctgaagataccgctgtgtattactgcgccaagggctggctgggcaacttcgattactggggccagggaaccctcgtgactgtctcgagcgcttctgtggccgctccctccgtgttcatcttcccaccttccgacgagcagctgaagtccggcactgcctctgtcgtgtgcctgctgaacaacttctaccctcgggaagccaaggtgcagtggaaagtggataacgccctgcagtccggcaactcccaggaatccgtgaccgagcaggactccaaggacagcacctactccctgagcagcaccctgaccctgtccaaggccgactacgagaagcacaaggtgtacgcctgtgaagtgacccaccagggcctgtccagccccgtgaccaagtccttcaaccggggcgagtgc

SEQ ID NO: 308 - protein, 692 aa, Artificial Sequence
  (12B3) VHCH1-Heavy chain-(28H1) VHCL
QVQLVQSGAEVKKPGSSVKVSCKASGGTFSSYAISWVRQAPGQGLEWMGGIIPIFGTANYAQKFQGRVTITADKSTSTAYMELSSLRSEDTAVYYCARSEFRFYADFDYWGQGTTVTVSSASTKGPSVFPLAPSSKSTSGGTAALGCLVKDYFPEPVTVSWNSGALTSGVHTFPAVLQSSGLYSLSSVVTVPSSSLGTQTYICNVNHKPSNTKVDKKVEPKSCDKTHTCPPCPAPEAAGGPSVFLFPPKPKDTLMISRTPEVTCVVVDVSHEDPEVKFNWYVDGVEVHNAKTKPREEQYNSTYRVVSVLTVLHQDWLNGKEYKCKVSNKALGAPIEKTISKAKGQPREPQVYTLPPSRDELTKNQVSLTCLVKGFYPSDIAVEWESNGQPENNYKTTPPVLDSDGSFFLYSKLTVDKSRWQQGNVFSCSVMHEALHNHYTQKSLSLSPGGGGGSGGGGSGGGGSGGGGSEVQLLESGGGLVQPGGSLRLSCAASGFTFSSHAMSWVRQAPGKGLEWVSAIWASGEQYYADSVKGRFTISRDNSKNTLYLQMNSLRAEDTAVYYCAKGWLGNFDYWGQGTLVTVSSASVAAPSVFIFPPSDEQLKSGTASVVCLLNNFYPREAKVQWKVDNALQSGNSQESVTEQDSKDSTYSLSSTLTLSKADYEKHKVYACEVTHQGLSSPVTKSFNRGEC

SEQ ID NO: 309 - DNA, 2070 bp, Artificial Sequence
  DNA (25G7) VHCH1-Heavy chain-(28H1) VHCL
gaggtgcaattgttggagtctgggggaggcttggtacagcctggggggtccctgagactctcctgtgcagcctccggattcacctttagcagttatgccatgagctgggtccgccaggctccagggaaggggctggagtgggtctcagctattagtggtagtggtggtagcacatactacgcagactccgtgaagggccggttcaccatctccagagacaattccaagaacacgctgtatctgcagatgaacagcctgagagccgaggacacggccgtatattactgtgcgcgtgacgacccgtggccgccgttcgactactggggccaaggaaccctggtcaccgtctcgagtgctagcaccaagggcccatccgtgttccctctggccccttccagcaagtctacctctggcggcacagccgctctgggctgcctcgtgaaggactacttccccgagcctgtgacagtgtcctggaactctggcgccctgacatccggcgtgcacacctttccagctgtgctgcagtcctccggcctgtactccctgtcctccgtcgtgacagtgccctccagctctctgggcacccagacctacatctgcaacgtgaaccacaagccctccaacaccaaggtggacaagaaggtggaacccaagtcctgcgacaagacccacacctgtcccccttgtcctgcccctgaagctgctggcggccctagcgtgttcctgttccccccaaagcccaaggacaccctgatgatctcccggacccccgaagtgacctgcgtggtggtggatgtgtcccacgaggaccctgaagtgaagttcaattggtacgtggacggcgtggaagtgcacaatgccaagaccaagcctagagaggaacagtacaactccacctaccgggtggtgtccgtgctgaccgtgctgcaccaggattggctgaacggcaaagagtacaagtgcaaggtgtccaacaaggccctgggagcccccatcgaaaagaccatctccaaggccaagggccagcctcgcgagcctcaggtgtacaccctgccccctagcagagatgagctgaccaagaaccaggtgtccctgacctgtctcgtgaaaggcttctacccctccgatatcgccgtggaatgggagagcaacggccagcccgagaacaactacaagaccaccccccctgtgctggactccgacggctcattcttcctgtactctaagctgacagtggacaagtcccggtggcagcagggcaacgtgttctcctgctccgtgatgcacgaggccctgcacaaccactacacccagaagtccctgtccctgtctcccgggggaggcggaggatctggcggaggcggatccggtggtggcggatctgggggcggtggatctgaggtgcagctgctggaatctgggggaggactggtgcagccaggcggatctctgaggctgtcctgcgctgcttccggctttaccttctccagccacgccatgagttgggtgcgccaggcacccggaaaaggactggaatgggtgtcagccatctgggcctccggcgagcagtactacgccgatagcgtgaagggccggttcaccatctctcgggataacagcaagaatactctgtacctgcagatgaactccctgcgcgctgaagataccgctgtgtattactgcgccaagggctggctgggcaacttcgattactggggccagggaaccctcgtgactgtctcgagcgcttctgtggccgctccctccgtgttcatcttcccaccttccgacgagcagctgaagtccggcactgcctctgtcgtgtgcctgctgaacaacttctaccctcgggaagccaaggtgcagtggaaagtggataacgccctgcagtccggcaactcccaggaatccgtgaccgagcaggactccaaggacagcacctactccctgagcagcaccctgaccctgtccaaggccgactacgagaagcacaaggtgtacgcctgtgaagtgacccaccagggcctgtccagccccgtgaccaagtccttcaaccggggcgagtgc

SEQ ID NO: 310 - protein, 690 aa, Artificial Sequence
  (25G7) VHCH1-Heavy chain-(28H1) VHCL
EVQLLESGGGLVQPGGSLRLSCAASGFTFSSYAMSWVRQAPGKGLEWVSAISGSGGSTYYADSVKGRFTISRDNSKNTLYLQMNSLRAEDTAVYYCARDDPWPPFDYWGQGTLVTVSSASTKGPSVFPLAPSSKSTSGGTAALGCLVKDYFPEPVTVSWNSGALTSGVHTFPAVLQSSGLYSLSSVVTVPSSSLGTQTYICNVNHKPSNTKVDKKVEPKSCDKTHTCPPCPAPEAAGGPSVFLFPPKPKDTLMISRTPEVTCVVVDVSHEDPEVKFNWYVDGVEVHNAKTKPREEQYNSTYRVVSVLTVLHQDWLNGKEYKCKVSNKALGAPIEKTISKAKGQPREPQVYTLPPSRDELTKNQVSLTCLVKGFYPSDIAVEWESNGQPENNYKTTPPVLDSDGSFFLYSKLTVDKSRWQQGNVFSCSVMHEALHNHYTQKSLSLSPGGGGGSGGGGSGGGGSGGGGSEVQLLESGGGLVQPGGSLRLSCAASGFTFSSHAMSWVRQAPGKGLEWVSAIWASGEQYYADSVKGRFTISRDNSKNTLYLQMNSLRAEDTAVYYCAKGWLGNFDYWGQGTLVTVSSASVAAPSVFIFPPSDEQLKSGTASVVCLLNNFYPREAKVQWKVDNALQSGNSQESVTEQDSKDSTYSLSSTLTLSKADYEKHKVYACEVTHQGLSSPVTKSFNRGEC

SEQ ID NO: 311 - DNA, 2073 bp, Artificial Sequence
  DNA (11D5) VHCH1-Heavy chain-(28H1) VHCL
caggtgcaattggtgcagtctggggctgaggtgaagaagcctgggtcctcggtgaaggtctcctgcaaggcctccggaggcacattcagcagctacgctataagctgggtgcgacaggcccctggacaagggctcgagtggatgggagggatcatccctatctttggtacagcaaactacgcacagaagttccagggcagggtcaccattactgcagacaaatccacgagcacagcctacatggagctgagcagcctgagatctgaggacaccgccgtgtattactgtgcgagatctactctgatctacggttacttcgactactggggccaagggaccaccgtgaccgtctcctcagctagcaccaagggcccatccgtgttccctctggccccttccagcaagtctacctctggcggcacagccgctctgggctgcctcgtgaaggactacttccccgagcctgtgacagtgtcctggaactctggcgccctgacatccggcgtgcacacctttccagctgtgctgcagtcctccggcctgtactccctgtcctccgtcgtgacagtgccctccagctctctgggcacccagacctacatctgcaacgtgaaccacaagccctccaacaccaaggtggacaagaaggtggaacccaagtcctgcgacaagacccacacctgtcccccttgtcctgcccctgaagctgctggcggccctagcgtgttcctgttccccccaaagcccaaggacaccctgatgatctcccggacccccgaagtgacctgcgtggtggtggatgtgtcccacgaggaccctgaagtgaagttcaattggtacgtggacggcgtggaagtgcacaatgccaagaccaagcctagagaggaacagtacaactccacctaccgggtggtgtccgtgctgaccgtgctgcaccaggattggctgaacggcaaagagtacaagtgcaaggtgtccaacaaggccctgggagcccccatcgaaaagaccatctccaaggccaagggccagcctcgcgagcctcaggtgtacaccctgccccctagcagagatgagctgaccaagaaccaggtgtccctgacctgtctcgtgaaaggcttctacccctccgatatcgccgtggaatgggagagcaacggccagcccgagaacaactacaagaccaccccccctgtgctggactccgacggctcattcttcctgtactctaagctgacagtggacaagtcccggtggcagcagggcaacgtgttctcctgctccgtgatgcacgaggccctgcacaaccactacacccagaagtccctgtccctgtctcccgggggaggcggaggatctggcggaggcggatccggtggtggcggatctgggggcggtggatctgaggtgcagctgctggaatctgggggaggactggtgcagccaggcggatctctgaggctgtcctgcgctgcttccggctttaccttctccagccacgccatgagttgggtgcgccaggcacccggaaaaggactggaatgggtgtcagccatctgggcctccggcgagcagtactacgccgatagcgtgaagggccggttcaccatctctcgggataacagcaagaatactctgtacctgcagatgaactccctgcgcgctgaagataccgctgtgtattactgcgccaagggctggctgggcaacttcgattactggggccagggaaccctcgtgactgtctcgagcgcttctgtggccgctccctccgtgttcatcttcccaccttccgacgagcagctgaagtccggcactgcctctgtcgtgtgcctgctgaacaacttctaccctcgggaagccaaggtgcagtggaaagtggataacgccctgcagtccggcaactcccaggaatccgtgaccgagcaggactccaaggacagcacctactccctgagcagcaccctgaccctgtccaaggccgactacgagaagcacaaggtgtacgcctgtgaagtgacccaccagggcctgtccagccccgtgaccaagtccttcaaccggggcgagtgc

SEQ ID NO: 312 - protein, 691 aa, Artificial Sequence
  (11D5) VHCH1-Heavy chain-(28H1) VHCL
QVQLVQSGAEVKKPGSSVKVSCKASGGTFSSYAISWVRQAPGQGLEWMGGIIPIFGTANYAQKFQGRVTITADKSTSTAYMELSSLRSEDTAVYYCARSTLIYGYFDYWGQGTTVTVSSASTKGPSVFPLAPSSKSTSGGTAALGCLVKDYFPEPVTVSWNSGALTSGVHTFPAVLQSSGLYSLSSVVTVPSSSLGTQTYICNVNHKPSNTKVDKKVEPKSCDKTHTCPPCPAPEAAGGPSVFLFPPKPKDTLMISRTPEVTCVVVDVSHEDPEVKFNWYVDGVEVHNAKTKPREEQYNSTYRVVSVLTVLHQDWLNGKEYKCKVSNKALGAPIEKTISKAKGQPREPQVYTLPPSRDELTKNQVSLTCLVKGFYPSDIAVEWESNGQPENNYKTTPPVLDSDGSFFLYSKLTVDKSRWQQGNVFSCSVMHEALHNHYTQKSLSLSPGGGGGSGGGGSGGGGSGGGGSEVQLLESGGGLVQPGGSLRLSCAASGFTFSSHAMSWVRQAPGKGLEWVSAIWASGEQYYADSVKGRFTISRDNSKNTLYLQMNSLRAEDTAVYYCAKGWLGNFDYWGQGTLVTVSSASVAAPSVFIFPPSDEQLKSGTASVVCLLNNFYPREAKVQWKVDNALQSGNSQESVTEQDSKDSTYSLSSTLTLSKADYEKHKVYACEVTHQGLSSPVTKSFNRGEC

SEQ ID NO: 313 - DNA, 1350 bp, Artificial Sequence
  DNA (12B3) VHCH1-heavy chain knob
caggtgcaattggtgcagtctggggctgaggtgaagaagcctgggtcctcggtgaaggtctcctgcaaggcctccggaggcacattcagcagctacgctataagctgggtgcgacaggcccctggacaagggctcgagtggatgggagggatcatccctatctttggtacagcaaactacgcacagaagttccagggcagggtcaccattactgcagacaaatccacgagcacagcctacatggagctgagcagcctgagatctgaggacaccgccgtgtattactgtgcgagatctgaattccgtttctacgctgacttcgactactggggccaagggaccaccgtgaccgtctcctcagctagcaccaagggccctagcgtgttccctctggcccctagcagcaagagcacaagtggaggaacagccgccctgggctgcctggtcaaggactacttccccgagcccgtgaccgtgtcctggaattctggcgccctgacaagcggcgtgcacacatttccagccgtgctgcagagcagcggcctgtactctctgagcagcgtcgtgaccgtgccctctagctctctgggcacccagacctacatctgcaacgtgaaccacaagcccagcaacaccaaagtggacaagaaggtggaacccaagagctgcgacaagacccacacctgtcccccttgccctgcccctgaagctgctggtggcccttccgtgttcctgttccccccaaagcccaaggacaccctgatgatcagccggacccccgaagtgacctgcgtggtggtcgatgtgtcccacgaggaccctgaagtgaagttcaattggtacgtggacggcgtggaagtgcacaatgccaagaccaagccgcgggaggagcagtacaacagcacgtaccgtgtggtcagcgtcctcaccgtcctgcaccaggactggctgaatggcaaggagtacaagtgcaaggtctccaacaaagccctcggcgcccccatcgagaaaaccatctccaaagccaaagggcagccccgagaaccacaggtgtacaccctgcccccatgccgggatgagctgaccaagaaccaggtcagcctgtggtgcctggtcaaaggcttctatcccagcgacatcgccgtggagtgggagagcaatgggcagccggagaacaactacaagaccacgcctcccgtgctggactccgacggctccttcttcctctacagcaagctcaccgtggacaagagcaggtggcagcaggggaacgtcttctcatgctccgtgatgcatgaggctctgcacaaccactacacgcagaagagcctctccctgtctccgggtaaa

SEQ ID NO: 314 - protein, 450 aa, Artificial Sequence
  (12B3) VHCH1-heavy chain knob
QVQLVQSGAEVKKPGSSVKVSCKASGGTFSSYAISWVRQAPGQGLEWMGGIIPIFGTANYAQKFQGRVTITADKSTSTAYMELSSLRSEDTAVYYCARSEFRFYADFDYWGQGTTVTVSSASTKGPSVFPLAPSSKSTSGGTAALGCLVKDYFPEPVTVSWNSGALTSGVHTFPAVLQSSGLYSLSSVVTVPSSSLGTQTYICNVNHKPSNTKVDKKVEPKSCDKTHTCPPCPAPEAAGGPSVFLFPPKPKDTLMISRTPEVTCVVVDVSHEDPEVKFNWYVDGVEVHNAKTKPREEQYNSTYRVVSVLTVLHQDWLNGKEYKCKVSNKALGAPIEKTISKAKGQPREPQVYTLPPCRDELTKNQVSLWCLVKGFYPSDIAVEWESNGQPENNYKTTPPVLDSDGSFFLYSKLTVDKSRWQQGNVFSCSVMHEALHNHYTQKSLSLSPGK

SEQ ID NO: 315 - DNA, 1344 bp, Artificial Sequence
  DNA (25G7) VHCH1-heavy chain knob
gaggtgcaattgttggagtctgggggaggcttggtacagcctggggggtccctgagactctcctgtgcagcctccggattcacctttagcagttatgccatgagctgggtccgccaggctccagggaaggggctggagtgggtctcagctattagtggtagtggtggtagcacatactacgcagactccgtgaagggccggttcaccatctccagagacaattccaagaacacgctgtatctgcagatgaacagcctgagagccgaggacacggccgtatattactgtgcgcgtgacgacccgtggccgccgttcgactactggggccaaggaaccctggtcaccgtctcgagtgctagcaccaagggccctagcgtgttccctctggcccctagcagcaagagcacaagtggaggaacagccgccctgggctgcctggtcaaggactacttccccgagcccgtgaccgtgtcctggaattctggcgccctgacaagcggcgtgcacacatttccagccgtgctgcagagcagcggcctgtactctctgagcagcgtcgtgaccgtgccctctagctctctgggcacccagacctacatctgcaacgtgaaccacaagcccagcaacaccaaagtggacaagaaggtggaacccaagagctgcgacaagacccacacctgtcccccttgccctgcccctgaagctgctggtggcccttccgtgttcctgttccccccaaagcccaaggacaccctgatgatcagccggacccccgaagtgacctgcgtggtggtcgatgtgtcccacgaggaccctgaagtgaagttcaattggtacgtggacggcgtggaagtgcacaatgccaagaccaagccgcgggaggagcagtacaacagcacgtaccgtgtggtcagcgtcctcaccgtcctgcaccaggactggctgaatggcaaggagtacaagtgcaaggtctccaacaaagccctcggcgcccccatcgagaaaaccatctccaaagccaaagggcagccccgagaaccacaggtgtacaccctgcccccatgccgggatgagctgaccaagaaccaggtcagcctgtggtgcctggtcaaaggcttctatcccagcgacatcgccgtggagtgggagagcaatgggcagccggagaacaactacaagaccacgcctcccgtgctggactccgacggctccttcttcctctacagcaagctcaccgtggacaagagcaggtggcagcaggggaacgtcttctcatgctccgtgatgcatgaggctctgcacaaccactacacgcagaagagcctctccctgtctccgggtaaa

SEQ ID NO: 316 - protein, 448 aa, Artificial Sequence
  (25G7) VHCH1-heavy chain knob
EVQLLESGGGLVQPGGSLRLSCAASGFTFSSYAMSWVRQAPGKGLEWVSAISGSGGSTYYADSVKGRFTISRDNSKNTLYLQMNSLRAEDTAVYYCARDDPWPPFDYWGQGTLVTVSSASTKGPSVFPLAPSSKSTSGGTAALGCLVKDYFPEPVTVSWNSGALTSGVHTFPAVLQSSGLYSLSSVVTVPSSSLGTQTYICNVNHKPSNTKVDKKVEPKSCDKTHTCPPCPAPEAAGGPSVFLFPPKPKDTLMISRTPEVTCVVVDVSHEDPEVKFNWYVDGVEVHNAKTKPREEQYNSTYRVVSVLTVLHQDWLNGKEYKCKVSNKALGAPIEKTISKAKGQPREPQVYTLPPCRDELTKNQVSLWCLVKGFYPSDIAVEWESNGQPENNYKTTPPVLDSDGSFFLYSKLTVDKSRWQQGNVFSCSVMHEALHNHYTQKSLSLSPGK

SEQ ID NO: 317 - DNA, 1752 bp, Artificial Sequence
  nucleotide sequence of (49B4) VHCH1 Fc knob VH (4B9)
caggtgcaattggtgcagtctggggctgaggtgaagaagcctgggtcctcggtgaaggtctcctgcaaggcctccggaggcacattcagcagctacgctataagctgggtgcgacaggcccctggacaagggctcgagtggatgggagggatcatccctatctttggtacagcaaactacgcacagaagttccagggcagggtcaccattactgcagacaaatccacgagcacagcctacatggagctgagcagcctgagatctgaggacaccgccgtgtattactgtgcgagagaatactaccgtggtccgtacgactactggggccaagggaccaccgtgaccgtctcctcagctagcaccaagggcccatcggtcttccccctggcaccctcctccaagagcacctctgggggcacagcggccctgggctgcctggtcaaggactacttccccgaaccggtgacggtgtcgtggaactcaggcgccctgaccagcggcgtgcacaccttcccggctgtcctacagtcctcaggactctactccctcagcagcgtggtgaccgtgccctccagcagcttgggcacccagacctacatctgcaacgtgaatcacaagcccagcaacaccaaggtggacaagaaagttgagcccaaatcttgtgacaaaactcacacatgcccaccgtgcccagcacctgaagctgcagggggaccgtcagtcttcctcttccccccaaaacccaaggacaccctcatgatctcccggacccctgaggtcacatgcgtggtggtggacgtgagccacgaagaccctgaggtcaagttcaactggtacgtggacggcgtggaggtgcataatgccaagacaaagccgcgggaggagcagtacaacagcacgtaccgtgtggtcagcgtcctcaccgtcctgcaccaggactggctgaatggcaaggagtacaagtgcaaggtctccaacaaagccctcggcgcccccatcgagaaaaccatctccaaagccaaagggcagccccgagaaccacaggtgtacaccctgcccccctgcagagatgagctgaccaagaaccaggtgtccctgtggtgtctggtcaagggcttctaccccagcgatatcgccgtggagtgggagagcaacggccagcctgagaacaactacaagaccaccccccctgtgctggacagcgacggcagcttcttcctgtactccaaactgaccgtggacaagagccggtggcagcagggcaacgtgttcagctgcagcgtgatgcacgaggccctgcacaaccactacacccagaagtccctgagcctgagccccggcggaggcggcggaagcggaggaggaggatctgggggcggaggttccggaggcggaggatccgaggtgcagctgctcgaaagcggcggaggactggtgcagcctggcggcagcctgagactgtcttgcgccgccagcggcttcaccttcagcagctacgccatgagctgggtccgccaggcccctggcaagggactggaatgggtgtccgccatcatcggctctggcgccagcacctactacgccgacagcgtgaagggccggttcaccatcagccgggacaacagcaagaacaccctgtacctgcagatgaacagcctgcgggccgaggacaccgccgtgtactactgcgccaagggatggttcggcggcttcaactactggggacagggcaccctggtcaccgtgtccagc

SEQ ID NO: 318 - DNA, 1725 bp, Artificial Sequence
  nucleotide sequence of (49B4) VHCH1 Fc hole VL (4B9)
caggtgcaattggtgcagtctggggctgaggtgaagaagcctgggtcctcggtgaaggtctcctgcaaggcctccggaggcacattcagcagctacgctataagctgggtgcgacaggcccctggacaagggctcgagtggatgggagggatcatccctatctttggtacagcaaactacgcacagaagttccagggcagggtcaccattactgcagacaaatccacgagcacagcctacatggagctgagcagcctgagatctgaggacaccgccgtgtattactgtgcgagagaatactaccgtggtccgtacgactactggggccaagggaccaccgtgaccgtctcctcagctagcaccaagggcccatcggtcttccccctggcaccctcctccaagagcacctctgggggcacagcggccctgggctgcctggtcaaggactacttccccgaaccggtgacggtgtcgtggaactcaggcgccctgaccagcggcgtgcacaccttcccggctgtcctacagtcctcaggactctactccctcagcagcgtggtgaccgtgccctccagcagcttgggcacccagacctacatctgcaacgtgaatcacaagcccagcaacaccaaggtggacaagaaagttgagcccaaatcttgtgacaaaactcacacatgcccaccgtgcccagcacctgaagctgcagggggaccgtcagtcttcctcttccccccaaaacccaaggacaccctcatgatctcccggacccctgaggtcacatgcgtggtggtggacgtgagccacgaagaccctgaggtcaagttcaactggtacgtggacggcgtggaggtgcataatgccaagacaaagccgcgggaggagcagtacaacagcacgtaccgtgtggtcagcgtcctcaccgtcctgcaccaggactggctgaatggcaaggagtacaagtgcaaggtctccaacaaagccctcggcgcccccatcgagaaaaccatctccaaagccaaagggcagccccgagaaccacaggtgtgcaccctgcccccatcccgggatgagctgaccaagaaccaggtcagcctctcgtgcgcagtcaaaggcttctatcccagcgacatcgccgtggagtgggagagcaatgggcagccggagaacaactacaagaccacgcctcccgtgctggactccgacggctccttcttcctcgtgagcaagctcaccgtggacaagagcaggtggcagcaggggaacgtcttctcatgctccgtgatgcatgaggctctgcacaaccactacacgcagaagagcctctccctgtctccgggtggaggcggcggaagcggaggaggaggatccggcggcggaggttccggaggcggtggatctgagatcgtgctgacccagtctcccggcaccctgtctctgagccctggcgagagagccaccctgtcctgcagagcctcccagtccgtgacctcctcctacctcgcctggtatcagcagaagcccggccaggcccctcggctgctgatcaacgtgggcagtcggagagccaccggcatccctgaccggttctccggctctggctccggcaccgacttcaccctgaccatctcccggctggaacccgaggacttcgccgtgtactactgccagcagggcatcatgctgccccccacctttggccagggcaccaaggtggaaatcaag

SEQ ID NO: 319 - protein, 584 aa, Artificial Sequence
  (49B4) VHCH1 Fc knob VH (4B9)
QVQLVQSGAEVKKPGSSVKVSCKASGGTFSSYAISWVRQAPGQGLEWMGGIIPIFGTANYAQKFQGRVTITADKSTSTAYMELSSLRSEDTAVYYCAREYYRGPYDYWGQGTTVTVSSASTKGPSVFPLAPSSKSTSGGTAALGCLVKDYFPEPVTVSWNSGALTSGVHTFPAVLQSSGLYSLSSVVTVPSSSLGTQTYICNVNHKPSNTKVDKKVEPKSCDKTHTCPPCPAPEAAGGPSVFLFPPKPKDTLMISRTPEVTCVVVDVSHEDPEVKFNWYVDGVEVHNAKTKPREEQYNSTYRVVSVLTVLHQDWLNGKEYKCKVSNKALGAPIEKTISKAKGQPREPQVYTLPPCRDELTKNQVSLWCLVKGFYPSDIAVEWESNGQPENNYKTTPPVLDSDGSFFLYSKLTVDKSRWQQGNVFSCSVMHEALHNHYTQKSLSLSPGGGGGSGGGGSGGGGSGGGGSEVQLLESGGGLVQPGGSLRLSCAASGFTFSSYAMSWVRQAPGKGLEWVSAIIGSGASTYYADSVKGRFTISRDNSKNTLYLQMNSLRAEDTAVYYCAKGWFGGFNYWGQGTLVTVSS

SEQ ID NO: 320 - protein, 575 aa, Artificial Sequence
  (49B4) VHCH1 Fc hole VL (4B9)
QVQLVQSGAEVKKPGSSVKVSCKASGGTFSSYAISWVRQAPGQGLEWMGGIIPIFGTANYAQKFQGRVTITADKSTSTAYMELSSLRSEDTAVYYCAREYYRGPYDYWGQGTTVTVSSASTKGPSVFPLAPSSKSTSGGTAALGCLVKDYFPEPVTVSWNSGALTSGVHTFPAVLQSSGLYSLSSVVTVPSSSLGTQTYICNVNHKPSNTKVDKKVEPKSCDKTHTCPPCPAPEAAGGPSVFLFPPKPKDTLMISRTPEVTCVVVDVSHEDPEVKFNWYVDGVEVHNAKTKPREEQYNSTYRVVSVLTVLHQDWLNGKEYKCKVSNKALGAPIEKTISKAKGQPREPQVCTLPPSRDELTKNQVSLSCAVKGFYPSDIAVEWESNGQPENNYKTTPPVLDSDGSFFLVSKLTVDKSRWQQGNVFSCSVMHEALHNHYTQKSLSLSPGGGGGSGGGGSGGGGSGGGGSEIVLTQSPGTLSLSPGERATLSCRASQSVTSSYLAWYQQKPGQAPRLLINVGSRRATGIPDRFSGSGSGTDFTLTISRLEPEDFAVYYCQQGIMLPPTFGQGTKVEIK

SEQ ID NO: 321 - DNA, 1755 bp, Artificial Sequence
  DNA (11D5) VHCH1 Fc knob VH (4B9)
caggtgcagctggtgcagtctggcgccgaagtgaagaaacccggcagcagcgtgaaggtgtcctgcaaggcttccggcggcaccttcagcagctacgccatttcttgggtgcgccaggcccctggacagggcctggaatggatgggcggcatcatccccatcttcggcaccgccaactacgcccagaaattccagggcagagtgaccatcaccgccgacaagagcaccagcaccgcctacatggaactgagcagcctgcggagcgaggacaccgccgtgtactactgtgccagaagcaccctgatctacggctacttcgactactggggccagggcaccaccgtgaccgtgtctagcgctagcaccaagggcccatcggtcttccccctggcaccctcctccaagagcacctctgggggcacagcggccctgggctgcctggtcaaggactacttccccgaaccggtgacggtgtcgtggaactcaggcgccctgaccagcggcgtgcacaccttcccggctgtcctacagtcctcaggactctactccctcagcagcgtggtgaccgtgccctccagcagcttgggcacccagacctacatctgcaacgtgaatcacaagcccagcaacaccaaggtggacaagaaagttgagcccaaatcttgtgacaaaactcacacatgcccaccgtgcccagcacctgaagctgcagggggaccgtcagtcttcctcttccccccaaaacccaaggacaccctcatgatctcccggacccctgaggtcacatgcgtggtggtggacgtgagccacgaagaccctgaggtcaagttcaactggtacgtggacggcgtggaggtgcataatgccaagacaaagccgcgggaggagcagtacaacagcacgtaccgtgtggtcagcgtcctcaccgtcctgcaccaggactggctgaatggcaaggagtacaagtgcaaggtctccaacaaagccctcggcgcccccatcgagaaaaccatctccaaagccaaagggcagccccgagaaccacaggtgtacaccctgcccccctgcagagatgagctgaccaagaaccaggtgtccctgtggtgtctggtcaagggcttctaccccagcgatatcgccgtggagtgggagagcaacggccagcctgagaacaactacaagaccaccccccctgtgctggacagcgacggcagcttcttcctgtactccaaactgaccgtggacaagagccggtggcagcagggcaacgtgttcagctgcagcgtgatgcacgaggccctgcacaaccactacacccagaagtccctgagcctgagccccggcggaggcggcggaagcggaggaggaggatctgggggcggaggttccggaggcggtggatctgaggtgcagctgctcgaaagcggcggaggactggtgcagcctggcggcagcctgagactgtcttgcgccgccagcggcttcaccttcagcagctacgccatgagctgggtccgccaggcccctggcaagggactggaatgggtgtccgccatcatcggctctggcgccagcacctactacgccgacagcgtgaagggccggttcaccatcagccgggacaacagcaagaacaccctgtacctgcagatgaacagcctgcgggccgaggacaccgccgtgtactactgcgccaagggatggttcggcggcttcaactactggggacagggcaccctggtcaccgtgtccagc

SEQ ID NO: 322 - DNA, 1728 bp, Artificial Sequence
  DNA (11D5) VHCH1 Fc hole VL (4B9)
caggtgcagctggtgcagtctggcgccgaagtgaagaaacccggcagcagcgtgaaggtgtcctgcaaggcttccggcggcaccttcagcagctacgccatttcttgggtgcgccaggcccctggacagggcctggaatggatgggcggcatcatccccatcttcggcaccgccaactacgcccagaaattccagggcagagtgaccatcaccgccgacaagagcaccagcaccgcctacatggaactgagcagcctgcggagcgaggacaccgccgtgtactactgtgccagaagcaccctgatctacggctacttcgactactggggccagggcaccaccgtgaccgtgtctagcgctagcaccaagggcccatcggtcttccccctggcaccctcctccaagagcacctctgggggcacagcggccctgggctgcctggtcaaggactacttccccgaaccggtgacggtgtcgtggaactcaggcgccctgaccagcggcgtgcacaccttcccggctgtcctacagtcctcaggactctactccctcagcagcgtggtgaccgtgccctccagcagcttgggcacccagacctacatctgcaacgtgaatcacaagcccagcaacaccaaggtggacaagaaagttgagcccaaatcttgtgacaaaactcacacatgcccaccgtgcccagcacctgaagctgcagggggaccgtcagtcttcctcttccccccaaaacccaaggacaccctcatgatctcccggacccctgaggtcacatgcgtggtggtggacgtgagccacgaagaccctgaggtcaagttcaactggtacgtggacggcgtggaggtgcataatgccaagacaaagccgcgggaggagcagtacaacagcacgtaccgtgtggtcagcgtcctcaccgtcctgcaccaggactggctgaatggcaaggagtacaagtgcaaggtctccaacaaagccctcggcgcccccatcgagaaaaccatctccaaagccaaagggcagccccgagaaccacaggtgtgcaccctgcccccatcccgggatgagctgaccaagaaccaggtcagcctctcgtgcgcagtcaaaggcttctatcccagcgacatcgccgtggagtgggagagcaatgggcagccggagaacaactacaagaccacgcctcccgtgctggactccgacggctccttcttcctcgtgagcaagctcaccgtggacaagagcaggtggcagcaggggaacgtcttctcatgctccgtgatgcatgaggctctgcacaaccactacacgcagaagagcctctccctgtctccgggtggaggcggcggaagcggaggaggaggatccggcggcggaggttccggaggcggaggatccgagatcgtgctgacccagtctcccggcaccctgtctctgagccctggcgagagagccaccctgtcctgcagagcctcccagtccgtgacctcctcctacctcgcctggtatcagcagaagcccggccaggcccctcggctgctgatcaacgtgggcagtcggagagccaccggcatccctgaccggttctccggctctggctccggcaccgacttcaccctgaccatctcccggctggaacccgaggacttcgccgtgtactactgccagcagggcatcatgctgccccccacctttggccagggcaccaaggtggaaatcaag

SEQ ID NO: 323 - protein, 585 aa, Artificial Sequence
  (11D5) VHCH1 Fc knob VH (4B9)
QVQLVQSGAEVKKPGSSVKVSCKASGGTFSSYAISWVRQAPGQGLEWMGGIIPIFGTANYAQKFQGRVTITADKSTSTAYMELSSLRSEDTAVYYCARSTLIYGYFDYWGQGTTVTVSSASTKGPSVFPLAPSSKSTSGGTAALGCLVKDYFPEPVTVSWNSGALTSGVHTFPAVLQSSGLYSLSSVVTVPSSSLGTQTYICNVNHKPSNTKVDKKVEPKSCDKTHTCPPCPAPEAAGGPSVFLFPPKPKDTLMISRTPEVTCVVVDVSHEDPEVKFNWYVDGVEVHNAKTKPREEQYNSTYRVVSVLTVLHQDWLNGKEYKCKVSNKALGAPIEKTISKAKGQPREPQVYTLPPCRDELTKNQVSLWCLVKGFYPSDIAVEWESNGQPENNYKTTPPVLDSDGSFFLYSKLTVDKSRWQQGNVFSCSVMHEALHNHYTQKSLSLSPGGGGGSGGGGSGGGGSGGGGSEVQLLESGGGLVQPGGSLRLSCAASGFTFSSYAMSWVRQAPGKGLEWVSAIIGSGASTYYADSVKGRFTISRDNSKNTLYLQMNSLRAEDTAVYYCAKGWFGGFNYWGQGTLVTVSS

SEQ ID NO: 324 - protein, 576 aa, Artificial Sequence
  (11D5) VHCH1 Fc hole VL (4B9)
QVQLVQSGAEVKKPGSSVKVSCKASGGTFSSYAISWVRQAPGQGLEWMGGIIPIFGTANYAQKFQGRVTITADKSTSTAYMELSSLRSEDTAVYYCARSTLIYGYFDYWGQGTTVTVSSASTKGPSVFPLAPSSKSTSGGTAALGCLVKDYFPEPVTVSWNSGALTSGVHTFPAVLQSSGLYSLSSVVTVPSSSLGTQTYICNVNHKPSNTKVDKKVEPKSCDKTHTCPPCPAPEAAGGPSVFLFPPKPKDTLMISRTPEVTCVVVDVSHEDPEVKFNWYVDGVEVHNAKTKPREEQYNSTYRVVSVLTVLHQDWLNGKEYKCKVSNKALGAPIEKTISKAKGQPREPQVCTLPPSRDELTKNQVSLSCAVKGFYPSDIAVEWESNGQPENNYKTTPPVLDSDGSFFLVSKLTVDKSRWQQGNVFSCSVMHEALHNHYTQKSLSLSPGGGGGSGGGGSGGGGSGGGGSEIVLTQSPGTLSLSPGERATLSCRASQSVTSSYLAWYQQKPGQAPRLLINVGSRRATGIPDRFSGSGSGTDFTLTISRLEPEDFAVYYCQQGIMLPPTFGQGTKVEIK

SEQ ID NO: 325 - DNA, 2460 bp, Artificial Sequence
  DNA (12B3) VHCH1_VHCH1 Fc knob VH (4B9)
caggtgcagctggtgcagtctggcgccgaagtgaagaaacccggcagcagcgtgaaggtgtcctgcaaggcttccggcggcaccttcagcagctacgccatttcttgggtgcgccaggcccctggacagggcctggaatggatgggcggcatcatccccatcttcggcaccgccaactacgcccagaaattccagggcagagtgaccatcaccgccgacaagagcaccagcaccgcctacatggaactgagcagcctgcggagcgaggacaccgccgtgtactactgtgccagaagcgagttccggttctacgccgacttcgactactggggccagggcaccaccgtgaccgtgtctagcgcttctaccaagggccccagcgtgttccctctggcccctagcagcaagagcacatctggcggaacagccgccctgggctgcctcgtgaaggactactttcccgagcccgtgacagtgtcctggaactctggcgccctgacaagcggcgtgcacacctttccagccgtgctgcagagcagcggcctgtactctctgagcagcgtcgtgactgtgcccagcagcagcctgggaacccagacctacatctgcaacgtgaaccacaagcccagcaacaccaaggtggacaagaaggtggaacccaagagctgcgacggcggaggcggatctggcggcggaggatcccaggtgcagctggtgcagagcggagctgaagtgaaaaagcctggctcctccgtgaaagtgtcttgtaaagccagcggcggcacattctcatcctacgccatcagctgggtgcggcaggctccaggccagggactggaatggatgggaggaattatccctatttttgggacagccaattatgctcagaaatttcaggggcgcgtgacaattacagccgacaagtccacctctacagcttatatggaactgtcctccctgcgctccgaggatacagctgtgtattactgcgctcggagcgagtttagattctatgccgattttgattattgggggcagggaacaacagtgactgtgtcctccgctagcaccaagggcccatcggtcttccccctggcaccctcctccaagagcacctctgggggcacagcggccctgggctgcctggtcaaggactacttccccgaaccggtgacggtgtcgtggaactcaggcgccctgaccagcggcgtgcacaccttcccggctgtcctacagtcctcaggactctactccctcagcagcgtggtgaccgtgccctccagcagcttgggcacccagacctacatctgcaacgtgaatcacaagcccagcaacaccaaggtggacaagaaagttgagcccaaatcttgtgacaaaactcacacatgcccaccgtgcccagcacctgaagctgcagggggaccgtcagtcttcctcttccccccaaaacccaaggacaccctcatgatctcccggacccctgaggtcacatgcgtggtggtggacgtgagccacgaagaccctgaggtcaagttcaactggtacgtggacggcgtggaggtgcataatgccaagacaaagccgcgggaggagcagtacaacagcacgtaccgtgtggtcagcgtcctcaccgtcctgcaccaggactggctgaatggcaaggagtacaagtgcaaggtctccaacaaagccctcggcgcccccatcgagaaaaccatctccaaagccaaagggcagccccgagaaccacaggtgtacaccctgcccccctgcagagatgagctgaccaagaaccaggtgtccctgtggtgtctggtcaagggcttctaccccagcgatatcgccgtggagtgggagagcaacggccagcctgagaacaactacaagaccaccccccctgtgctggacagcgacggcagcttcttcctgtactccaaactgaccgtggacaagagccggtggcagcagggcaacgtgttcagctgcagcgtgatgcacgaggccctgcacaaccactacacccagaagtccctgagcctgagccccggcggaggcggcggaagcggaggaggaggatctgggggcggaggttccggaggcggaggatccgaggtgcagctgctcgaaagcggcggaggactggtgcagcctggcggcagcctgagactgtcttgcgccgccagcggcttcaccttcagcagctacgccatgagctgggtccgccaggcccctggcaagggactggaatgggtgtccgccatcatcggctctggcgccagcacctactacgccgacagcgtgaagggccggttcaccatcagccgggacaacagcaagaacaccctgtacctgcagatgaacagcctgcgggccgaggacaccgccgtgtactactgcgccaagggatggttcggcggcttcaactactggggacagggcaccctggtcaccgtgtccagc

SEQ ID NO: 326 - DNA, 2433 bp, Artificial Sequence
  DNA (12B3) VHCH1_VHCH1 Fc hole VL (4B9)
caggtgcagctggtgcagtctggcgccgaagtgaagaaacccggcagcagcgtgaaggtgtcctgcaaggcttccggcggcaccttcagcagctacgccatttcttgggtgcgccaggcccctggacagggcctggaatggatgggcggcatcatccccatcttcggcaccgccaactacgcccagaaattccagggcagagtgaccatcaccgccgacaagagcaccagcaccgcctacatggaactgagcagcctgcggagcgaggacaccgccgtgtactactgtgccagaagcgagttccggttctacgccgacttcgactactggggccagggcaccaccgtgaccgtgtctagcgcttctaccaagggccccagcgtgttccctctggcccctagcagcaagagcacatctggcggaacagccgccctgggctgcctcgtgaaggactactttcccgagcccgtgacagtgtcctggaactctggcgccctgacaagcggcgtgcacacctttccagccgtgctgcagagcagcggcctgtactctctgagcagcgtcgtgactgtgcccagcagcagcctgggaacccagacctacatctgcaacgtgaaccacaagcccagcaacaccaaggtggacaagaaggtggaacccaagagctgcgacggcggaggcggatctggcggcggaggatcccaggtgcagctggtgcagagcggagctgaagtgaaaaagcctggctcctccgtgaaagtgtcttgtaaagccagcggcggcacattctcatcctacgccatcagctgggtgcggcaggctccaggccagggactggaatggatgggaggaattatccctatttttgggacagccaattatgctcagaaatttcaggggcgcgtgacaattacagccgacaagtccacctctacagcttatatggaactgtcctccctgcgctccgaggatacagctgtgtattactgcgctcggagcgagtttagattctatgccgattttgattattgggggcagggaacaacagtgactgtgtcctccgctagcaccaagggcccatcggtcttccccctggcaccctcctccaagagcacctctgggggcacagcggccctgggctgcctggtcaaggactacttccccgaaccggtgacggtgtcgtggaactcaggcgccctgaccagcggcgtgcacaccttcccggctgtcctacagtcctcaggactctactccctcagcagcgtggtgaccgtgccctccagcagcttgggcacccagacctacatctgcaacgtgaatcacaagcccagcaacaccaaggtggacaagaaagttgagcccaaatcttgtgacaaaactcacacatgcccaccgtgcccagcacctgaagctgcagggggaccgtcagtcttcctcttccccccaaaacccaaggacaccctcatgatctcccggacccctgaggtcacatgcgtggtggtggacgtgagccacgaagaccctgaggtcaagttcaactggtacgtggacggcgtggaggtgcataatgccaagacaaagccgcgggaggagcagtacaacagcacgtaccgtgtggtcagcgtcctcaccgtcctgcaccaggactggctgaatggcaaggagtacaagtgcaaggtctccaacaaagccctcggcgcccccatcgagaaaaccatctccaaagccaaagggcagccccgagaaccacaggtgtgcaccctgcccccatcccgggatgagctgaccaagaaccaggtcagcctctcgtgcgcagtcaaaggcttctatcccagcgacatcgccgtggagtgggagagcaatgggcagccggagaacaactacaagaccacgcctcccgtgctggactccgacggctccttcttcctcgtgagcaagctcaccgtggacaagagcaggtggcagcaggggaacgtcttctcatgctccgtgatgcatgaggctctgcacaaccactacacgcagaagagcctctccctgtctccgggtggaggcggcggaagcggaggaggaggatccggcggcggaggttccggaggcggtggatctgagatcgtgctgacccagtctcccggcaccctgtctctgagccctggcgagagagccaccctgtcctgcagagcctcccagtccgtgacctcctcctacctcgcctggtatcagcagaagcccggccaggcccctcggctgctgatcaacgtgggcagtcggagagccaccggcatccctgaccggttctccggctctggctccggcaccgacttcaccctgaccatctcccggctggaacccgaggacttcgccgtgtactactgccagcagggcatcatgctgccccccacctttggccagggcaccaaggtggaaatcaag

SEQ ID NO: 327 - protein, 820 aa, Artificial Sequence
  (12B3) VHCH1_VHCH1 Fc knob VH (4B9)
QVQLVQSGAEVKKPGSSVKVSCKASGGTFSSYAISWVRQAPGQGLEWMGGIIPIFGTANYAQKFQGRVTITADKSTSTAYMELSSLRSEDTAVYYCARSEFRFYADFDYWGQGTTVTVSSASTKGPSVFPLAPSSKSTSGGTAALGCLVKDYFPEPVTVSWNSGALTSGVHTFPAVLQSSGLYSLSSVVTVPSSSLGTQTYICNVNHKPSNTKVDKKVEPKSCDGGGGSGGGGSQVQLVQSGAEVKKPGSSVKVSCKASGGTFSSYAISWVRQAPGQGLEWMGGIIPIFGTANYAQKFQGRVTITADKSTSTAYMELSSLRSEDTAVYYCARSEFRFYADFDYWGQGTTVTVSSASTKGPSVFPLAPSSKSTSGGTAALGCLVKDYFPEPVTVSWNSGALTSGVHTFPAVLQSSGLYSLSSVVTVPSSSLGTQTYICNVNHKPSNTKVDKKVEPKSCDKTHTCPPCPAPEAAGGPSVFLFPPKPKDTLMISRTPEVTCVVVDVSHEDPEVKFNWYVDGVEVHNAKTKPREEQYNSTYRVVSVLTVLHQDWLNGKEYKCKVSNKALGAPIEKTISKAKGQPREPQVYTLPPCRDELTKNQVSLWCLVKGFYPSDIAVEWESNGQPENNYKTTPPVLDSDGSFFLYSKLTVDKSRWQQGNVFSCSVMHEALHNHYTQKSLSLSPGGGGGSGGGGSGGGGSGGGGSEVQLLESGGGLVQPGGSLRLSCAASGFTFSSYAMSWVRQAPGKGLEWVSAIIGSGASTYYADSVKGRFTISRDNSKNTLYLQMNSLRAEDTAVYYCAKGWFGGFNYWGQGTLVTVSS

SEQ ID NO: 328 - protein, 811 aa, Artificial Sequence
  (12B3) VHCH1_VHCH1 Fc hole VL (4B9)
QVQLVQSGAEVKKPGSSVKVSCKASGGTFSSYAISWVRQAPGQGLEWMGGIIPIFGTANYAQKFQGRVTITADKSTSTAYMELSSLRSEDTAVYYCARSEFRFYADFDYWGQGTTVTVSSASTKGPSVFPLAPSSKSTSGGTAALGCLVKDYFPEPVTVSWNSGALTSGVHTFPAVLQSSGLYSLSSVVTVPSSSLGTQTYICNVNHKPSNTKVDKKVEPKSCDGGGGSGGGGSQVQLVQSGAEVKKPGSSVKVSCKASGGTFSSYAISWVRQAPGQGLEWMGGIIPIFGTANYAQKFQGRVTITADKSTSTAYMELSSLRSEDTAVYYCARSEFRFYADFDYWGQGTTVTVSSASTKGPSVFPLAPSSKSTSGGTAALGCLVKDYFPEPVTVSWNSGALTSGVHTFPAVLQSSGLYSLSSVVTVPSSSLGTQTYICNVNHKPSNTKVDKKVEPKSCDKTHTCPPCPAPEAAGGPSVFLFPPKPKDTLMISRTPEVTCVVVDVSHEDPEVKFNWYVDGVEVHNAKTKPREEQYNSTYRVVSVLTVLHQDWLNGKEYKCKVSNKALGAPIEKTISKAKGQPREPQVCTLPPSRDELTKNQVSLSCAVKGFYPSDIAVEWESNGQPENNYKTTPPVLDSDGSFFLVSKLTVDKSRWQQGNVFSCSVMHEALHNHYTQKSLSLSPGGGGGSGGGGSGGGGSGGGGSEIVLTQSPGTLSLSPGERATLSCRASQSVTSSYLAWYQQKPGQAPRLLINVGSRRATGIPDRFSGSGSGTDFTLTISRLEPEDFAVYYCQQGIMLPPTFGQGTKVEIK

SEQ ID NO: 329 - DNA, 2448 bp, Artificial Sequence
  DNA (25G7) VHCH1_VHCH1 Fc knob VH (4B9)
gaggtgcagctgctggaatctggcggcggactggtgcagcctggcggatctctgagactgagctgtgccgccagcggcttcaccttcagcagctacgccatgagctgggtgcgccaggcccctggaaaaggcctggaatgggtgtccgccatctctggcagcggcggcagcacctactacgccgattctgtgaagggccggttcaccatcagccgggacaacagcaagaacaccctgtacctgcagatgaacagcctgcgggccgaggacaccgccgtgtactattgcgccagggacgacccctggcccccctttgattattggggacagggcaccctcgtgaccgtgtccagcgcttctaccaagggccccagcgtgttccctctggcccctagcagcaagagcacatctggcggaacagccgccctgggctgcctcgtgaaggactactttcccgagcccgtgacagtgtcctggaactctggcgccctgacaagcggcgtgcacacctttccagccgtgctgcagagcagcggcctgtactctctgagcagcgtcgtgactgtgcccagcagcagcctgggaacccagacctacatctgcaacgtgaaccacaagcccagcaacaccaaggtggacaagaaggtggaacccaagagctgcgacggcggaggcggatctggcggcggaggatccgaagtgcagctgctggaaagtgggggaggcctggtgcagccagggggaagcctgagactgtcttgtgccgcttccggctttacctttagctcttacgccatgtcttgggtgcggcaggctccaggcaagggactggaatgggtgtcagctatcagcggctctggcggctccacatattacgccgacagcgtgaagggcagattcacaatctccagagacaactccaagaatactctgtacctgcagatgaattccctgcgcgccgaagatacagctgtgtattactgtgcccgcgacgatccttggccccctttcgactactgggggcagggaacactcgtgacagtgtcatccgctagcaccaagggcccatcggtcttccccctggcaccctcctccaagagcacctctgggggcacagcggccctgggctgcctggtcaaggactacttccccgaaccggtgacggtgtcgtggaactcaggcgccctgaccagcggcgtgcacaccttcccggctgtcctacagtcctcaggactctactccctcagcagcgtggtgaccgtgccctccagcagcttgggcacccagacctacatctgcaacgtgaatcacaagcccagcaacaccaaggtggacaagaaagttgagcccaaatcttgtgacaaaactcacacatgcccaccgtgcccagcacctgaagctgcagggggaccgtcagtcttcctcttccccccaaaacccaaggacaccctcatgatctcccggacccctgaggtcacatgcgtggtggtggacgtgagccacgaagaccctgaggtcaagttcaactggtacgtggacggcgtggaggtgcataatgccaagacaaagccgcgggaggagcagtacaacagcacgtaccgtgtggtcagcgtcctcaccgtcctgcaccaggactggctgaatggcaaggagtacaagtgcaaggtctccaacaaagccctcggcgcccccatcgagaaaaccatctccaaagccaaagggcagccccgagaaccacaggtgtacaccctgcccccctgcagagatgagctgaccaagaaccaggtgtccctgtggtgtctggtcaagggcttctaccccagcgatatcgccgtggagtgggagagcaacggccagcctgagaacaactacaagaccaccccccctgtgctggacagcgacggcagcttcttcctgtactccaaactgaccgtggacaagagccggtggcagcagggcaacgtgttcagctgcagcgtgatgcacgaggccctgcacaaccactacacccagaagtccctgagcctgagccccggcggaggcggcggaagcggaggaggaggatctgggggcggaggttccggaggcggaggatccgaggtgcagctgctcgaaagcggcggaggactggtgcagcctggcggcagcctgagactgtcttgcgccgccagcggcttcaccttcagcagctacgccatgagctgggtccgccaggcccctggcaagggactggaatgggtgtccgccatcatcggctctggcgccagcacctactacgccgacagcgtgaagggccggttcaccatcagccgggacaacagcaagaacaccctgtacctgcagatgaacagcctgcgggccgaggacaccgccgtgtactactgcgccaagggatggttcggcggcttcaactactggggacagggcaccctggtcaccgtgtccagc

SEQ ID NO: 330 - DNA, 2421 bp, Artificial Sequence
  DNA (25G7) VHCH1_VHCH1 Fc hole VL (4B9)
gaggtgcagctgctggaatctggcggcggactggtgcagcctggcggatctctgagactgagctgtgccgccagcggcttcaccttcagcagctacgccatgagctgggtgcgccaggcccctggaaaaggcctggaatgggtgtccgccatctctggcagcggcggcagcacctactacgccgattctgtgaagggccggttcaccatcagccgggacaacagcaagaacaccctgtacctgcagatgaacagcctgcgggccgaggacaccgccgtgtactattgcgccagggacgacccctggcccccctttgattattggggacagggcaccctcgtgaccgtgtccagcgcttctaccaagggccccagcgtgttccctctggcccctagcagcaagagcacatctggcggaacagccgccctgggctgcctcgtgaaggactactttcccgagcccgtgacagtgtcctggaactctggcgccctgacaagcggcgtgcacacctttccagccgtgctgcagagcagcggcctgtactctctgagcagcgtcgtgactgtgcccagcagcagcctgggaacccagacctacatctgcaacgtgaaccacaagcccagcaacaccaaggtggacaagaaggtggaacccaagagctgcgacggcggaggcggatctggcggcggaggatccgaagtgcagctgctggaaagtgggggaggcctggtgcagccagggggaagcctgagactgtcttgtgccgcttccggctttacctttagctcttacgccatgtcttgggtgcggcaggctccaggcaagggactggaatgggtgtcagctatcagcggctctggcggctccacatattacgccgacagcgtgaagggcagattcacaatctccagagacaactccaagaatactctgtacctgcagatgaattccctgcgcgccgaagatacagctgtgtattactgtgcccgcgacgatccttggccccctttcgactactgggggcagggaacactcgtgacagtgtcatccgctagcaccaagggcccatcggtcttccccctggcaccctcctccaagagcacctctgggggcacagcggccctgggctgcctggtcaaggactacttccccgaaccggtgacggtgtcgtggaactcaggcgccctgaccagcggcgtgcacaccttcccggctgtcctacagtcctcaggactctactccctcagcagcgtggtgaccgtgccctccagcagcttgggcacccagacctacatctgcaacgtgaatcacaagcccagcaacaccaaggtggacaagaaagttgagcccaaatcttgtgacaaaactcacacatgcccaccgtgcccagcacctgaagctgcagggggaccgtcagtcttcctcttccccccaaaacccaaggacaccctcatgatctcccggacccctgaggtcacatgcgtggtggtggacgtgagccacgaagaccctgaggtcaagttcaactggtacgtggacggcgtggaggtgcataatgccaagacaaagccgcgggaggagcagtacaacagcacgtaccgtgtggtcagcgtcctcaccgtcctgcaccaggactggctgaatggcaaggagtacaagtgcaaggtctccaacaaagccctcggcgcccccatcgagaaaaccatctccaaagccaaagggcagccccgagaaccacaggtgtgcaccctgcccccatcccgggatgagctgaccaagaaccaggtcagcctctcgtgcgcagtcaaaggcttctatcccagcgacatcgccgtggagtgggagagcaatgggcagccggagaacaactacaagaccacgcctcccgtgctggactccgacggctccttcttcctcgtgagcaagctcaccgtggacaagagcaggtggcagcaggggaacgtcttctcatgctccgtgatgcatgaggctctgcacaaccactacacgcagaagagcctctccctgtctccgggtggaggcggcggaagcggaggaggaggatccggcggcggaggttccggaggcggtggatctgagatcgtgctgacccagtctcccggcaccctgtctctgagccctggcgagagagccaccctgtcctgcagagcctcccagtccgtgacctcctcctacctcgcctggtatcagcagaagcccggccaggcccctcggctgctgatcaacgtgggcagtcggagagccaccggcatccctgaccggttctccggctctggctccggcaccgacttcaccctgaccatctcccggctggaacccgaggacttcgccgtgtactactgccagcagggcatcatgctgccccccacctttggccagggcaccaaggtggaaatcaag

SEQ ID NO: 331 - protein, 816 aa, Artificial Sequence
  (25G7) VHCH1_VHCH1 Fc knob VH (4B9)
EVQLLESGGGLVQPGGSLRLSCAASGFTFSSYAMSWVRQAPGKGLEWVSAISGSGGSTYYADSVKGRFTISRDNSKNTLYLQMNSLRAEDTAVYYCARDDPWPPFDYWGQGTLVTVSSASTKGPSVFPLAPSSKSTSGGTAALGCLVKDYFPEPVTVSWNSGALTSGVHTFPAVLQSSGLYSLSSVVTVPSSSLGTQTYICNVNHKPSNTKVDKKVEPKSCDGGGGSGGGGSEVQLLESGGGLVQPGGSLRLSCAASGFTFSSYAMSWVRQAPGKGLEWVSAISGSGGSTYYADSVKGRFTISRDNSKNTLYLQMNSLRAEDTAVYYCARDDPWPPFDYWGQGTLVTVSSASTKGPSVFPLAPSSKSTSGGTAALGCLVKDYFPEPVTVSWNSGALTSGVHTFPAVLQSSGLYSLSSVVTVPSSSLGTQTYICNVNHKPSNTKVDKKVEPKSCDKTHTCPPCPAPEAAGGPSVFLFPPKPKDTLMISRTPEVTCVVVDVSHEDPEVKFNWYVDGVEVHNAKTKPREEQYNSTYRVVSVLTVLHQDWLNGKEYKCKVSNKALGAPIEKTISKAKGQPREPQVYTLPPCRDELTKNQVSLWCLVKGFYPSDIAVEWESNGQPENNYKTTPPVLDSDGSFFLYSKLTVDKSRWQQGNVFSCSVMHEALHNHYTQKSLSLSPGGGGGSGGGGSGGGGSGGGGSEVQLLESGGGLVQPGGSLRLSCAASGFTFSSYAMSWVRQAPGKGLEWVSAIIGSGASTYYADSVKGRFTISRDNSKNTLYLQMNSLRAEDTAVYYCAKGWFGGFNYWGQGTLVTVSS

SEQ ID NO: 332 - protein, 807 aa, Artificial Sequence
  (25G7) VHCH1_VHCH1 Fc hole VL (4B9)
EVQLLESGGGLVQPGGSLRLSCAASGFTFSSYAMSWVRQAPGKGLEWVSAISGSGGSTYYADSVKGRFTISRDNSKNTLYLQMNSLRAEDTAVYYCARDDPWPPFDYWGQGTLVTVSSASTKGPSVFPLAPSSKSTSGGTAALGCLVKDYFPEPVTVSWNSGALTSGVHTFPAVLQSSGLYSLSSVVTVPSSSLGTQTYICNVNHKPSNTKVDKKVEPKSCDGGGGSGGGGSEVQLLESGGGLVQPGGSLRLSCAASGFTFSSYAMSWVRQAPGKGLEWVSAISGSGGSTYYADSVKGRFTISRDNSKNTLYLQMNSLRAEDTAVYYCARDDPWPPFDYWGQGTLVTVSSASTKGPSVFPLAPSSKSTSGGTAALGCLVKDYFPEPVTVSWNSGALTSGVHTFPAVLQSSGLYSLSSVVTVPSSSLGTQTYICNVNHKPSNTKVDKKVEPKSCDKTHTCPPCPAPEAAGGPSVFLFPPKPKDTLMISRTPEVTCVVVDVSHEDPEVKFNWYVDGVEVHNAKTKPREEQYNSTYRVVSVLTVLHQDWLNGKEYKCKVSNKALGAPIEKTISKAKGQPREPQVCTLPPSRDELTKNQVSLSCAVKGFYPSDIAVEWESNGQPENNYKTTPPVLDSDGSFFLVSKLTVDKSRWQQGNVFSCSVMHEALHNHYTQKSLSLSPGGGGGSGGGGSGGGGSGGGGSEIVLTQSPGTLSLSPGERATLSCRASQSVTSSYLAWYQQKPGQAPRLLINVGSRRATGIPDRFSGSGSGTDFTLTISRLEPEDFAVYYCQQGIMLPPTFGQGTKVEIK

SEQ ID NO: 333 - DNA, 2454 bp, Artificial Sequence
  DNA (11D5) VHCH1_VHCH1 Fc knob VH (4B9)
caggtgcagctggtgcagtctggcgccgaagtgaagaaacccggcagcagcgtgaaggtgtcctgcaaggcttccggcggcaccttcagcagctacgccatttcttgggtgcgccaggcccctggacagggcctggaatggatgggcggcatcatccccatcttcggcaccgccaactacgcccagaaattccagggcagagtgaccatcaccgccgacaagagcaccagcaccgcctacatggaactgagcagcctgcggagcgaggacaccgccgtgtactactgtgccagaagcaccctgatctacggctacttcgactactggggccagggcaccaccgtgaccgtgtctagcgcttctaccaagggccccagcgtgttccctctggcccctagcagcaagagcacatctggcggaacagccgccctgggctgcctcgtgaaggactactttcccgagcccgtgacagtgtcctggaactctggcgccctgacaagcggcgtgcacacctttccagccgtgctgcagagcagcggcctgtactctctgagcagcgtcgtgactgtgcccagcagcagcctgggaacccagacctacatctgcaacgtgaaccacaagcccagcaacaccaaggtggacaagaaggtggaacccaagagctgcgacggcggaggcggatctggcggcggaggatcccaggtgcagctggtgcagagcggagctgaagtgaaaaagcctggctcctccgtgaaagtgtcttgtaaagccagcggcggcacattctcatcctacgccatcagctgggtgcggcaggctccaggccagggactggaatggatgggaggaattatccctatttttgggacagccaattatgctcagaaatttcaggggcgcgtgacaattacagccgacaagtccacctctacagcttatatggaactgtcctccctgcgctccgaggatacagctgtgtattactgcgcccggtccacactgatctatggatactttgattattgggggcagggaacaacagtgactgtgtcctccgctagcaccaagggcccatcggtcttccccctggcaccctcctccaagagcacctctgggggcacagcggccctgggctgcctggtcaaggactacttccccgaaccggtgacggtgtcgtggaactcaggcgccctgaccagcggcgtgcacaccttcccggctgtcctacagtcctcaggactctactccctcagcagcgtggtgaccgtgccctccagcagcttgggcacccagacctacatctgcaacgtgaatcacaagcccagcaacaccaaggtggacaagaaagttgagcccaaatcttgtgacaaaactcacacatgcccaccgtgcccagcacctgaagctgcagggggaccgtcagtcttcctcttccccccaaaacccaaggacaccctcatgatctcccggacccctgaggtcacatgcgtggtggtggacgtgagccacgaagaccctgaggtcaagttcaactggtacgtggacggcgtggaggtgcataatgccaagacaaagccgcgggaggagcagtacaacagcacgtaccgtgtggtcagcgtcctcaccgtcctgcaccaggactggctgaatggcaaggagtacaagtgcaaggtctccaacaaagccctcggcgcccccatcgagaaaaccatctccaaagccaaagggcagccccgagaaccacaggtgtacaccctgcccccctgcagagatgagctgaccaagaaccaggtgtccctgtggtgtctggtcaagggcttctaccccagcgatatcgccgtggagtgggagagcaacggccagcctgagaacaactacaagaccaccccccctgtgctggacagcgacggcagcttcttcctgtactccaaactgaccgtggacaagagccggtggcagcagggcaacgtgttcagctgcagcgtgatgcacgaggccctgcacaaccactacacccagaagtccctgagcctgagccccggcggaggcggcggaagcggaggaggaggatctgggggcggaggttccggaggcggaggatccgaggtgcagctgctcgaaagcggcggaggactggtgcagcctggcggcagcctgagactgtcttgcgccgccagcggcttcaccttcagcagctacgccatgagctgggtccgccaggcccctggcaagggactggaatgggtgtccgccatcatcggctctggcgccagcacctactacgccgacagcgtgaagggccggttcaccatcagccgggacaacagcaagaacaccctgtacctgcagatgaacagcctgcgggccgaggacaccgccgtgtactactgcgccaagggatggttcggcggcttcaactactggggacagggcaccctggtcaccgtgtccagc

SEQ ID NO: 334 - DNA, 2427 bp, Artificial Sequence
  DNA (11D5) VHCH1_VHCH1 Fc hole VL (4B9)
caggtgcagctggtgcagtctggcgccgaagtgaagaaacccggcagcagcgtgaaggtgtcctgcaaggcttccggcggcaccttcagcagctacgccatttcttgggtgcgccaggcccctggacagggcctggaatggatgggcggcatcatccccatcttcggcaccgccaactacgcccagaaattccagggcagagtgaccatcaccgccgacaagagcaccagcaccgcctacatggaactgagcagcctgcggagcgaggacaccgccgtgtactactgtgccagaagcaccctgatctacggctacttcgactactggggccagggcaccaccgtgaccgtgtctagcgcttctaccaagggccccagcgtgttccctctggcccctagcagcaagagcacatctggcggaacagccgccctgggctgcctcgtgaaggactactttcccgagcccgtgacagtgtcctggaactctggcgccctgacaagcggcgtgcacacctttccagccgtgctgcagagcagcggcctgtactctctgagcagcgtcgtgactgtgcccagcagcagcctgggaacccagacctacatctgcaacgtgaaccacaagcccagcaacaccaaggtggacaagaaggtggaacccaagagctgcgacggcggaggcggatctggcggcggaggatcccaggtgcagctggtgcagagcggagctgaagtgaaaaagcctggctcctccgtgaaagtgtcttgtaaagccagcggcggcacattctcatcctacgccatcagctgggtgcggcaggctccaggccagggactggaatggatgggaggaattatccctatttttgggacagccaattatgctcagaaatttcaggggcgcgtgacaattacagccgacaagtccacctctacagcttatatggaactgtcctccctgcgctccgaggatacagctgtgtattactgcgcccggtccacactgatctatggatactttgattattgggggcagggaacaacagtgactgtgtcctccgctagcaccaagggcccatcggtcttccccctggcaccctcctccaagagcacctctgggggcacagcggccctgggctgcctggtcaaggactacttccccgaaccggtgacggtgtcgtggaactcaggcgccctgaccagcggcgtgcacaccttcccggctgtcctacagtcctcaggactctactccctcagcagcgtggtgaccgtgccctccagcagcttgggcacccagacctacatctgcaacgtgaatcacaagcccagcaacaccaaggtggacaagaaagttgagcccaaatcttgtgacaaaactcacacatgcccaccgtgcccagcacctgaagctgcagggggaccgtcagtcttcctcttccccccaaaacccaaggacaccctcatgatctcccggacccctgaggtcacatgcgtggtggtggacgtgagccacgaagaccctgaggtcaagttcaactggtacgtggacggcgtggaggtgcataatgccaagacaaagccgcgggaggagcagtacaacagcacgtaccgtgtggtcagcgtcctcaccgtcctgcaccaggactggctgaatggcaaggagtacaagtgcaaggtctccaacaaagccctcggcgcccccatcgagaaaaccatctccaaagccaaagggcagccccgagaaccacaggtgtgcaccctgcccccatcccgggatgagctgaccaagaaccaggtcagcctctcgtgcgcagtcaaaggcttctatcccagcgacatcgccgtggagtgggagagcaatgggcagccggagaacaactacaagaccacgcctcccgtgctggactccgacggctccttcttcctcgtgagcaagctcaccgtggacaagagcaggtggcagcaggggaacgtcttctcatgctccgtgatgcatgaggctctgcacaaccactacacgcagaagagcctctccctgtctccgggtggaggcggcggaagcggaggaggaggatccggcggcggaggttccggaggcggtggatctgagatcgtgctgacccagtctcccggcaccctgtctctgagccctggcgagagagccaccctgtcctgcagagcctcccagtccgtgacctcctcctacctcgcctggtatcagcagaagcccggccaggcccctcggctgctgatcaacgtgggcagtcggagagccaccggcatccctgaccggttctccggctctggctccggcaccgacttcaccctgaccatctcccggctggaacccgaggacttcgccgtgtactactgccagcagggcatcatgctgccccccacctttggccagggcaccaaggtggaaatcaag

SEQ ID NO: 335 - protein, 818 aa, Artificial Sequence
  (11D5) VHCH1_VHCH1 Fc knob VH (4B9)
QVQLVQSGAEVKKPGSSVKVSCKASGGTFSSYAISWVRQAPGQGLEWMGGIIPIFGTANYAQKFQGRVTITADKSTSTAYMELSSLRSEDTAVYYCARSTLIYGYFDYWGQGTTVTVSSASTKGPSVFPLAPSSKSTSGGTAALGCLVKDYFPEPVTVSWNSGALTSGVHTFPAVLQSSGLYSLSSVVTVPSSSLGTQTYICNVNHKPSNTKVDKKVEPKSCDGGGGSGGGGSQVQLVQSGAEVKKPGSSVKVSCKASGGTFSSYAISWVRQAPGQGLEWMGGIIPIFGTANYAQKFQGRVTITADKSTSTAYMELSSLRSEDTAVYYCARSTLIYGYFDYWGQGTTVTVSSASTKGPSVFPLAPSSKSTSGGTAALGCLVKDYFPEPVTVSWNSGALTSGVHTFPAVLQSSGLYSLSSVVTVPSSSLGTQTYICNVNHKPSNTKVDKKVEPKSCDKTHTCPPCPAPEAAGGPSVFLFPPKPKDTLMISRTPEVTCVVVDVSHEDPEVKFNWYVDGVEVHNAKTKPREEQYNSTYRVVSVLTVLHQDWLNGKEYKCKVSNKALGAPIEKTISKAKGQPREPQVYTLPPCRDELTKNQVSLWCLVKGFYPSDIAVEWESNGQPENNYKTTPPVLDSDGSFFLYSKLTVDKSRWQQGNVFSCSVMHEALHNHYTQKSLSLSPGGGGGSGGGGSGGGGSGGGGSEVQLLESGGGLVQPGGSLRLSCAASGFTFSSYAMSWVRQAPGKGLEWVSAIIGSGASTYYADSVKGRFTISRDNSKNTLYLQMNSLRAEDTAVYYCAKGWFGGFNYWGQGTLVTVSS

SEQ ID NO: 336 - protein, 809 aa, Artificial Sequence
  (11D5) VHCH1_VHCH1 Fc hole VL (4B9)
QVQLVQSGAEVKKPGSSVKVSCKASGGTFSSYAISWVRQAPGQGLEWMGGIIPIFGTANYAQKFQGRVTITADKSTSTAYMELSSLRSEDTAVYYCARSTLIYGYFDYWGQGTTVTVSSASTKGPSVFPLAPSSKSTSGGTAALGCLVKDYFPEPVTVSWNSGALTSGVHTFPAVLQSSGLYSLSSVVTVPSSSLGTQTYICNVNHKPSNTKVDKKVEPKSCDGGGGSGGGGSQVQLVQSGAEVKKPGSSVKVSCKASGGTFSSYAISWVRQAPGQGLEWMGGIIPIFGTANYAQKFQGRVTITADKSTSTAYMELSSLRSEDTAVYYCARSTLIYGYFDYWGQGTTVTVSSASTKGPSVFPLAPSSKSTSGGTAALGCLVKDYFPEPVTVSWNSGALTSGVHTFPAVLQSSGLYSLSSVVTVPSSSLGTQTYICNVNHKPSNTKVDKKVEPKSCDKTHTCPPCPAPEAAGGPSVFLFPPKPKDTLMISRTPEVTCVVVDVSHEDPEVKFNWYVDGVEVHNAKTKPREEQYNSTYRVVSVLTVLHQDWLNGKEYKCKVSNKALGAPIEKTISKAKGQPREPQVCTLPPSRDELTKNQVSLSCAVKGFYPSDIAVEWESNGQPENNYKTTPPVLDSDGSFFLVSKLTVDKSRWQQGNVFSCSVMHEALHNHYTQKSLSLSPGGGGGSGGGGSGGGGSGGGGSEIVLTQSPGTLSLSPGERATLSCRASQSVTSSYLAWYQQKPGQAPRLLINVGSRRATGIPDRFSGSGSGTDFTLTISRLEPEDFAVYYCQQGIMLPPTFGQGTKVEIK

SEQ ID NO: 337 - DNA, 2460 bp, Artificial Sequence
  DNA (9B11) VHCH1_VHCH1 Fc knob VH (4B9)
caggtgcaattggtgcagtctggggctgaggtgaagaagcctgggtcctcggtgaaggtctcctgcaaggcctccggaggcacattcagcagctacgctataagctgggtgcgacaggcccctggacaagggctcgagtggatgggagggatcatccctatctttggtacagcaaactacgcacagaagttccagggcagggtcaccattactgcagacaaatccacgagcacagcctacatggagctgagcagcctgagatctgaggacaccgccgtgtattactgtgcgagatcttctggtgcttacccgggttacttcgactactggggccaagggaccaccgtgaccgtctcctcagcttctaccaagggccccagcgtgttccctctggcccctagcagcaagagcacatctggcggaacagccgccctgggctgcctcgtgaaggactactttcccgagcccgtgacagtgtcctggaactctggcgccctgacaagcggcgtgcacacctttccagccgtgctgcagagcagcggcctgtactctctgagcagcgtcgtgactgtgcccagcagcagcctgggaacccagacctacatctgcaacgtgaaccacaagcccagcaacaccaaggtggacaagaaggtggaacccaagagctgcgacggcggaggcggatctggcggcggaggatcccaggtgcaattggtgcagtctggggctgaggtgaagaagcctgggtcctcggtgaaggtctcctgcaaggcctccggaggcacattcagcagctacgctataagctgggtgcgacaggcccctggacaagggctcgagtggatgggagggatcatccctatctttggtacagcaaactacgcacagaagttccagggcagggtcaccattactgcagacaaatccacgagcacagcctacatggagctgagcagcctgagatctgaggacaccgccgtgtattactgtgcgagatcttctggtgcttacccgggttacttcgactactggggccaagggaccaccgtgaccgtctcctcagctagcaccaagggcccatcggtcttccccctggcaccctcctccaagagcacctctgggggcacagcggccctgggctgcctggtcaaggactacttccccgaaccggtgacggtgtcgtggaactcaggcgccctgaccagcggcgtgcacaccttcccggctgtcctacagtcctcaggactctactccctcagcagcgtggtgaccgtgccctccagcagcttgggcacccagacctacatctgcaacgtgaatcacaagcccagcaacaccaaggtggacaagaaagttgagcccaaatcttgtgacaaaactcacacatgcccaccgtgcccagcacctgaagctgcagggggaccgtcagtcttcctcttccccccaaaacccaaggacaccctcatgatctcccggacccctgaggtcacatgcgtggtggtggacgtgagccacgaagaccctgaggtcaagttcaactggtacgtggacggcgtggaggtgcataatgccaagacaaagccgcgggaggagcagtacaacagcacgtaccgtgtggtcagcgtcctcaccgtcctgcaccaggactggctgaatggcaaggagtacaagtgcaaggtctccaacaaagccctcggcgcccccatcgagaaaaccatctccaaagccaaagggcagccccgagaaccacaggtgtacaccctgcccccctgcagagatgagctgaccaagaaccaggtgtccctgtggtgtctggtcaagggcttctaccccagcgatatcgccgtggagtgggagagcaacggccagcctgagaacaactacaagaccaccccccctgtgctggacagcgacggcagcttcttcctgtactccaaactgaccgtggacaagagccggtggcagcagggcaacgtgttcagctgcagcgtgatgcacgaggccctgcacaaccactacacccagaagtccctgagcctgagccccggcggaggcggcggaagcggaggaggaggatctgggggcggaggttccggaggcggaggatccgaggtgcagctgctcgaaagcggcggaggactggtgcagcctggcggcagcctgagactgtcttgcgccgccagcggcttcaccttcagcagctacgccatgagctgggtccgccaggcccctggcaagggactggaatgggtgtccgccatcatcggctctggcgccagcacctactacgccgacagcgtgaagggccggttcaccatcagccgggacaacagcaagaacaccctgtacctgcagatgaacagcctgcgggccgaggacaccgccgtgtactactgcgccaagggatggttcggcggcttcaactactggggacagggcaccctggtcaccgtgtccagc

SEQ ID NO: 338 - DNA, 2433 bp, Artificial Sequence
  DNA (9B11) VHCH1_VHCH1 Fc hole VL (4B9)
caggtgcaattggtgcagtctggggctgaggtgaagaagcctgggtcctcggtgaaggtctcctgcaaggcctccggaggcacattcagcagctacgctataagctgggtgcgacaggcccctggacaagggctcgagtggatgggagggatcatccctatctttggtacagcaaactacgcacagaagttccagggcagggtcaccattactgcagacaaatccacgagcacagcctacatggagctgagcagcctgagatctgaggacaccgccgtgtattactgtgcgagatcttctggtgcttacccgggttacttcgactactggggccaagggaccaccgtgaccgtctcctcagcttctaccaagggccccagcgtgttccctctggcccctagcagcaagagcacatctggcggaacagccgccctgggctgcctcgtgaaggactactttcccgagcccgtgacagtgtcctggaactctggcgccctgacaagcggcgtgcacacctttccagccgtgctgcagagcagcggcctgtactctctgagcagcgtcgtgactgtgcccagcagcagcctgggaacccagacctacatctgcaacgtgaaccacaagcccagcaacaccaaggtggacaagaaggtggaacccaagagctgcgacggcggaggcggatctggcggcggaggatcccaggtgcaattggtgcagtctggggctgaggtgaagaagcctgggtcctcggtgaaggtctcctgcaaggcctccggaggcacattcagcagctacgctataagctgggtgcgacaggcccctggacaagggctcgagtggatgggagggatcatccctatctttggtacagcaaactacgcacagaagttccagggcagggtcaccattactgcagacaaatccacgagcacagcctacatggagctgagcagcctgagatctgaggacaccgccgtgtattactgtgcgagatcttctggtgcttacccgggttacttcgactactggggccaagggaccaccgtgaccgtctcctcagctagcaccaagggcccatcggtcttccccctggcaccctcctccaagagcacctctgggggcacagcggccctgggctgcctggtcaaggactacttccccgaaccggtgacggtgtcgtggaactcaggcgccctgaccagcggcgtgcacaccttcccggctgtcctacagtcctcaggactctactccctcagcagcgtggtgaccgtgccctccagcagcttgggcacccagacctacatctgcaacgtgaatcacaagcccagcaacaccaaggtggacaagaaagttgagcccaaatcttgtgacaaaactcacacatgcccaccgtgcccagcacctgaagctgcagggggaccgtcagtcttcctcttccccccaaaacccaaggacaccctcatgatctcccggacccctgaggtcacatgcgtggtggtggacgtgagccacgaagaccctgaggtcaagttcaactggtacgtggacggcgtggaggtgcataatgccaagacaaagccgcgggaggagcagtacaacagcacgtaccgtgtggtcagcgtcctcaccgtcctgcaccaggactggctgaatggcaaggagtacaagtgcaaggtctccaacaaagccctcggcgcccccatcgagaaaaccatctccaaagccaaagggcagccccgagaaccacaggtgtgcaccctgcccccatcccgggatgagctgaccaagaaccaggtcagcctctcgtgcgcagtcaaaggcttctatcccagcgacatcgccgtggagtgggagagcaatgggcagccggagaacaactacaagaccacgcctcccgtgctggactccgacggctccttcttcctcgtgagcaagctcaccgtggacaagagcaggtggcagcaggggaacgtcttctcatgctccgtgatgcatgaggctctgcacaaccactacacgcagaagagcctctccctgtctccgggtggaggcggcggaagcggaggaggaggatccggcggcggaggttccggaggcggtggatctgagatcgtgctgacccagtctcccggcaccctgtctctgagccctggcgagagagccaccctgtcctgcagagcctcccagtccgtgacctcctcctacctcgcctggtatcagcagaagcccggccaggcccctcggctgctgatcaacgtgggcagtcggagagccaccggcatccctgaccggttctccggctctggctccggcaccgacttcaccctgaccatctcccggctggaacccgaggacttcgccgtgtactactgccagcagggcatcatgctgccccccacctttggccagggcaccaaggtggaaatcaag

SEQ ID NO: 339 - protein, 820 aa, Artificial Sequence
  (9B11) VHCH1_VHCH1 Fc knob VH (4B9)
QVQLVQSGAEVKKPGSSVKVSCKASGGTFSSYAISWVRQAPGQGLEWMGGIIPIFGTANYAQKFQGRVTITADKSTSTAYMELSSLRSEDTAVYYCARSSGAYPGYFDYWGQGTTVTVSSASTKGPSVFPLAPSSKSTSGGTAALGCLVKDYFPEPVTVSWNSGALTSGVHTFPAVLQSSGLYSLSSVVTVPSSSLGTQTYICNVNHKPSNTKVDKKVEPKSCDGGGGSGGGGSQVQLVQSGAEVKKPGSSVKVSCKASGGTFSSYAISWVRQAPGQGLEWMGGIIPIFGTANYAQKFQGRVTITADKSTSTAYMELSSLRSEDTAVYYCARSSGAYPGYFDYWGQGTTVTVSSASTKGPSVFPLAPSSKSTSGGTAALGCLVKDYFPEPVTVSWNSGALTSGVHTFPAVLQSSGLYSLSSVVTVPSSSLGTQTYICNVNHKPSNTKVDKKVEPKSCDKTHTCPPCPAPEAAGGPSVFLFPPKPKDTLMISRTPEVTCVVVDVSHEDPEVKFNWYVDGVEVHNAKTKPREEQYNSTYRVVSVLTVLHQDWLNGKEYKCKVSNKALGAPIEKTISKAKGQPREPQVYTLPPCRDELTKNQVSLWCLVKGFYPSDIAVEWESNGQPENNYKTTPPVLDSDGSFFLYSKLTVDKSRWQQGNVFSCSVMHEALHNHYTQKSLSLSPGGGGGSGGGGSGGGGSGGGGSEVQLLESGGGLVQPGGSLRLSCAASGFTFSSYAMSWVRQAPGKGLEWVSAIIGSGASTYYADSVKGRFTISRDNSKNTLYLQMNSLRAEDTAVYYCAKGWFGGFNYWGQGTLVTVSS

SEQ ID NO: 340 - protein, 811 aa, Artificial Sequence
  (9B11) VHCH1_VHCH1 Fc hole VL (4B9)
QVQLVQSGAEVKKPGSSVKVSCKASGGTFSSYAISWVRQAPGQGLEWMGGIIPIFGTANYAQKFQGRVTITADKSTSTAYMELSSLRSEDTAVYYCARSSGAYPGYFDYWGQGTTVTVSSASTKGPSVFPLAPSSKSTSGGTAALGCLVKDYFPEPVTVSWNSGALTSGVHTFPAVLQSSGLYSLSSVVTVPSSSLGTQTYICNVNHKPSNTKVDKKVEPKSCDGGGGSGGGGSQVQLVQSGAEVKKPGSSVKVSCKASGGTFSSYAISWVRQAPGQGLEWMGGIIPIFGTANYAQKFQGRVTITADKSTSTAYMELSSLRSEDTAVYYCARSSGAYPGYFDYWGQGTTVTVSSASTKGPSVFPLAPSSKSTSGGTAALGCLVKDYFPEPVTVSWNSGALTSGVHTFPAVLQSSGLYSLSSVVTVPSSSLGTQTYICNVNHKPSNTKVDKKVEPKSCDKTHTCPPCPAPEAAGGPSVFLFPPKPKDTLMISRTPEVTCVVVDVSHEDPEVKFNWYVDGVEVHNAKTKPREEQYNSTYRVVSVLTVLHQDWLNGKEYKCKVSNKALGAPIEKTISKAKGQPREPQVCTLPPSRDELTKNQVSLSCAVKGFYPSDIAVEWESNGQPENNYKTTPPVLDSDGSFFLVSKLTVDKSRWQQGNVFSCSVMHEALHNHYTQKSLSLSPGGGGGSGGGGSGGGGSGGGGSEIVLTQSPGTLSLSPGERATLSCRASQSVTSSYLAWYQQKPGQAPRLLINVGSRRATGIPDRFSGSGSGTDFTLTISRLEPEDFAVYYCQQGIMLPPTFGQGTKVEIK

SEQ ID NO: 341 - DNA, 2433 bp, Artificial Sequence
  DNA (12B3) VHCH1_VHCH1 Fc knob VL (4B9)
caggtgcagctggtgcagtctggcgccgaagtgaagaaacccggcagcagcgtgaaggtgtcctgcaaggcttccggcggcaccttcagcagctacgccatttcttgggtgcgccaggcccctggacagggcctggaatggatgggcggcatcatccccatcttcggcaccgccaactacgcccagaaattccagggcagagtgaccatcaccgccgacaagagcaccagcaccgcctacatggaactgagcagcctgcggagcgaggacaccgccgtgtactactgtgccagaagcgagttccggttctacgccgacttcgactactggggccagggcaccaccgtgaccgtgtctagcgcttctacaaagggccccagcgtgttccctctggcccctagcagcaagtctaccagcggaggaacagccgccctgggctgcctcgtgaaggactactttcccgagcccgtgacagtgtcctggaacagcggagccctgacaagcggcgtgcacacctttccagccgtgctgcagagcagcggcctgtactctctgagcagcgtcgtgactgtgcccagcagcagcctgggaacccagacctacatctgcaacgtgaaccacaagcccagcaacaccaaggtggacaagaaggtggaacccaagagctgcgacggcggaggcggatcaggcggcggaggatcccaggtgcagctggtgcagagcggagctgaagtgaaaaagcctggctcctccgtgaaagtgtcttgtaaagccagcggcggcacattctcatcctacgccatcagctgggtgcggcaggctccaggccagggactggaatggatgggaggaattatccctatttttgggacagccaattatgctcagaaatttcaggggcgcgtgacaattacagccgacaagtccacctctacagcttatatggaactgtcctccctgcgctccgaggatacagctgtgtattactgcgctcggagcgagtttagattctatgccgattttgattattgggggcagggaacaacagtgactgtgtcctccgctagcaccaagggcccatcggtcttccccctggcaccctcctccaagagcacctctgggggcacagcggccctgggctgcctggtcaaggactacttccccgaaccggtgacggtgtcgtggaactcaggcgccctgaccagcggcgtgcacaccttcccggctgtcctacagtcctcaggactctactccctcagcagcgtggtgaccgtgccctccagcagcttgggcacccagacctacatctgcaacgtgaatcacaagcccagcaacaccaaggtggacaagaaagttgagcccaaatcttgtgacaaaactcacacatgcccaccgtgcccagcacctgaagctgcagggggaccgtcagtcttcctcttccccccaaaacccaaggacaccctcatgatctcccggacccctgaggtcacatgcgtggtggtggacgtgagccacgaagaccctgaggtcaagttcaactggtacgtggacggcgtggaggtgcataatgccaagacaaagccgcgggaggagcagtacaacagcacgtaccgtgtggtcagcgtcctcaccgtcctgcaccaggactggctgaatggcaaggagtacaagtgcaaggtctccaacaaagccctcggcgcccccatcgagaaaaccatctccaaagccaaagggcagccccgagaaccacaggtgtacaccctgcccccctgcagagatgagctgaccaagaaccaggtgtccctgtggtgtctggtcaagggcttctaccccagcgatatcgccgtggagtgggagagcaacggccagcctgagaacaactacaagaccaccccccctgtgctggacagcgacggcagcttcttcctgtactccaaactgaccgtggacaagagccggtggcagcagggcaacgtgttcagctgcagcgtgatgcacgaggccctgcacaaccactacacccagaagtccctgagcctgagccccggcggaggcggcggaagcggaggaggaggatctgggggcggaggttccggaggcggtggatctgagatcgtgctgacccagtctcccggcaccctgtctctgagccctggcgagagagccaccctgtcctgcagagcctcccagtccgtgacctcctcctacctcgcctggtatcagcagaagcccggccaggcccctcggctgctgatcaacgtgggcagtcggagagccaccggcatccctgaccggttctccggctctggctccggcaccgacttcaccctgaccatctcccggctggaacccgaggacttcgccgtgtactactgccagcagggcatcatgctgccccccacctttggccagggcaccaaggtggaaatcaag

SEQ ID NO: 342 - DNA, 2460 bp, Artificial Sequence
  DNA (12B3) VHCH1_VHCH1 Fc hole VH (4B9)
caggtgcagctggtgcagtctggcgccgaagtgaagaaacccggcagcagcgtgaaggtgtcctgcaaggcttccggcggcaccttcagcagctacgccatttcttgggtgcgccaggcccctggacagggcctggaatggatgggcggcatcatccccatcttcggcaccgccaactacgcccagaaattccagggcagagtgaccatcaccgccgacaagagcaccagcaccgcctacatggaactgagcagcctgcggagcgaggacaccgccgtgtactactgtgccagaagcgagttccggttctacgccgacttcgactactggggccagggcaccaccgtgaccgtgtctagcgcttctacaaagggccccagcgtgttccctctggcccctagcagcaagtctaccagcggaggaacagccgccctgggctgcctcgtgaaggactactttcccgagcccgtgacagtgtcctggaacagcggagccctgacaagcggcgtgcacacctttccagccgtgctgcagagcagcggcctgtactctctgagcagcgtcgtgactgtgcccagcagcagcctgggaacccagacctacatctgcaacgtgaaccacaagcccagcaacaccaaggtggacaagaaggtggaacccaagagctgcgacggcggaggcggatcaggcggcggaggatcccaggtgcagctggtgcagagcggagctgaagtgaaaaagcctggctcctccgtgaaagtgtcttgtaaagccagcggcggcacattctcatcctacgccatcagctgggtgcggcaggctccaggccagggactggaatggatgggaggaattatccctatttttgggacagccaattatgctcagaaatttcaggggcgcgtgacaattacagccgacaagtccacctctacagcttatatggaactgtcctccctgcgctccgaggatacagctgtgtattactgcgctcggagcgagtttagattctatgccgattttgattattgggggcagggaacaacagtgactgtgtcctccgctagcaccaagggcccatcggtcttccccctggcaccctcctccaagagcacctctgggggcacagcggccctgggctgcctggtcaaggactacttccccgaaccggtgacggtgtcgtggaactcaggcgccctgaccagcggcgtgcacaccttcccggctgtcctacagtcctcaggactctactccctcagcagcgtggtgaccgtgccctccagcagcttgggcacccagacctacatctgcaacgtgaatcacaagcccagcaacaccaaggtggacaagaaagttgagcccaaatcttgtgacaaaactcacacatgcccaccgtgcccagcacctgaagctgcagggggaccgtcagtcttcctcttccccccaaaacccaaggacaccctcatgatctcccggacccctgaggtcacatgcgtggtggtggacgtgagccacgaagaccctgaggtcaagttcaactggtacgtggacggcgtggaggtgcataatgccaagacaaagccgcgggaggagcagtacaacagcacgtaccgtgtggtcagcgtcctcaccgtcctgcaccaggactggctgaatggcaaggagtacaagtgcaaggtctccaacaaagccctcggcgcccccatcgagaaaaccatctccaaagccaaagggcagccccgagaaccacaggtgtgcaccctgcccccatcccgggatgagctgaccaagaaccaggtcagcctctcgtgcgcagtcaaaggcttctatcccagcgacatcgccgtggagtgggagagcaatgggcagccggagaacaactacaagaccacgcctcccgtgctggactccgacggctccttcttcctcgtgagcaagctcaccgtggacaagagcaggtggcagcaggggaacgtcttctcatgctccgtgatgcatgaggctctgcacaaccactacacgcagaagagcctctccctgtctccgggtggaggcggcggaagcggaggaggaggatccggcggcggaggttccggaggcggaggatccgaggtgcagctgctcgaaagcggcggaggactggtgcagcctggcggcagcctgagactgtcttgcgccgccagcggcttcaccttcagcagctacgccatgagctgggtccgccaggcccctggcaagggactggaatgggtgtccgccatcatcggctctggcgccagcacctactacgccgacagcgtgaagggccggttcaccatcagccgggacaacagcaagaacaccctgtacctgcagatgaacagcctgcgggccgaggacaccgccgtgtactactgcgccaagggatggttcggcggcttcaactactggggacagggcaccctggtcaccgtgtccagc

SEQ ID NO: 343 - protein, 811 aa, Artificial Sequence
  (12B3) VHCH1_VHCH1 Fc knob VL (4B9)
QVQLVQSGAEVKKPGSSVKVSCKASGGTFSSYAISWVRQAPGQGLEWMGGIIPIFGTANYAQKFQGRVTITADKSTSTAYMELSSLRSEDTAVYYCARSEFRFYADFDYWGQGTTVTVSSASTKGPSVFPLAPSSKSTSGGTAALGCLVKDYFPEPVTVSWNSGALTSGVHTFPAVLQSSGLYSLSSVVTVPSSSLGTQTYICNVNHKPSNTKVDKKVEPKSCDGGGGSGGGGSQVQLVQSGAEVKKPGSSVKVSCKASGGTFSSYAISWVRQAPGQGLEWMGGIIPIFGTANYAQKFQGRVTITADKSTSTAYMELSSLRSEDTAVYYCARSEFRFYADFDYWGQGTTVTVSSASTKGPSVFPLAPSSKSTSGGTAALGCLVKDYFPEPVTVSWNSGALTSGVHTFPAVLQSSGLYSLSSVVTVPSSSLGTQTYICNVNHKPSNTKVDKKVEPKSCDKTHTCPPCPAPEAAGGPSVFLFPPKPKDTLMISRTPEVTCVVVDVSHEDPEVKFNWYVDGVEVHNAKTKPREEQYNSTYRVVSVLTVLHQDWLNGKEYKCKVSNKALGAPIEKTISKAKGQPREPQVYTLPPCRDELTKNQVSLWCLVKGFYPSDIAVEWESNGQPENNYKTTPPVLDSDGSFFLYSKLTVDKSRWQQGNVFSCSVMHEALHNHYTQKSLSLSPGGGGGSGGGGSGGGGSGGGGSEIVLTQSPGTLSLSPGERATLSCRASQSVTSSYLAWYQQKPGQAPRLLINVGSRRATGIPDRFSGSGSGTDFTLTISRLEPEDFAVYYCQQGIMLPPTFGQGTKVEIK

SEQ ID NO: 344 - protein, 820 aa, Artificial Sequence
  (12B3) VHCH1_VHCH1 Fc hole VH (4B9)
QVQLVQSGAEVKKPGSSVKVSCKASGGTFSSYAISWVRQAPGQGLEWMGGIIPIFGTANYAQKFQGRVTITADKSTSTAYMELSSLRSEDTAVYYCARSEFRFYADFDYWGQGTTVTVSSASTKGPSVFPLAPSSKSTSGGTAALGCLVKDYFPEPVTVSWNSGALTSGVHTFPAVLQSSGLYSLSSVVTVPSSSLGTQTYICNVNHKPSNTKVDKKVEPKSCDGGGGSGGGGSQVQLVQSGAEVKKPGSSVKVSCKASGGTFSSYAISWVRQAPGQGLEWMGGIIPIFGTANYAQKFQGRVTITADKSTSTAYMELSSLRSEDTAVYYCARSEFRFYADFDYWGQGTTVTVSSASTKGPSVFPLAPSSKSTSGGTAALGCLVKDYFPEPVTVSWNSGALTSGVHTFPAVLQSSGLYSLSSVVTVPSSSLGTQTYICNVNHKPSNTKVDKKVEPKSCDKTHTCPPCPAPEAAGGPSVFLFPPKPKDTLMISRTPEVTCVVVDVSHEDPEVKFNWYVDGVEVHNAKTKPREEQYNSTYRVVSVLTVLHQDWLNGKEYKCKVSNKALGAPIEKTISKAKGQPREPQVCTLPPSRDELTKNQVSLSCAVKGFYPSDIAVEWESNGQPENNYKTTPPVLDSDGSFFLVSKLTVDKSRWQQGNVFSCSVMHEALHNHYTQKSLSLSPGGGGGSGGGGSGGGGSGGGGSEVQLLESGGGLVQPGGSLRLSCAASGFTFSSYAMSWVRQAPGKGLEWVSAIIGSGASTYYADSVKGRFTISRDNSKNTLYLQMNSLRAEDTAVYYCAKGWFGGFNYWGQGTLVTVSS

SEQ ID NO: 345 - DNA, 2421 bp, Artificial Sequence
  DNA (25G7) VHCH1_VHCH1 Fc knob VL (4B9)
gaggtgcagctgctggaatctggcggcggactggtgcagcctggcggatctctgagactgagctgtgccgccagcggcttcaccttcagcagctacgccatgagctgggtgcgccaggcccctggaaaaggcctggaatgggtgtccgccatctctggcagcggcggcagcacctactacgccgattctgtgaagggccggttcaccatcagccgggacaacagcaagaacaccctgtacctgcagatgaacagcctgcgggccgaggacaccgccgtgtactattgcgccagggacgacccctggcccccctttgattattggggacagggcaccctcgtgaccgtgtccagcgcttctacaaagggccccagcgtgttccctctggcccctagcagcaagtctaccagcggaggaacagccgccctgggctgcctcgtgaaggactactttcccgagcccgtgacagtgtcctggaacagcggagccctgacaagcggcgtgcacacctttccagccgtgctgcagagcagcggcctgtactctctgagcagcgtcgtgactgtgcccagcagcagcctgggaacccagacctacatctgcaacgtgaaccacaagcccagcaacaccaaggtggacaagaaggtggaacccaagagctgcgacggcggaggcggatcaggcggcggaggatccgaagtgcagctgctggaaagtgggggaggcctggtgcagccagggggaagcctgagactgtcttgtgccgcttccggctttacctttagctcttacgccatgtcttgggtgcggcaggctccaggcaagggactggaatgggtgtcagctatcagcggctctggcggctccacatattacgccgacagcgtgaagggcagattcacaatctccagagacaactccaagaatactctgtacctgcagatgaattccctgcgcgccgaagatacagctgtgtattactgtgcccgcgacgatccttggccccctttcgactactgggggcagggaacactcgtgacagtgtcatccgctagcaccaagggcccatcggtcttccccctggcaccctcctccaagagcacctctgggggcacagcggccctgggctgcctggtcaaggactacttccccgaaccggtgacggtgtcgtggaactcaggcgccctgaccagcggcgtgcacaccttcccggctgtcctacagtcctcaggactctactccctcagcagcgtggtgaccgtgccctccagcagcttgggcacccagacctacatctgcaacgtgaatcacaagcccagcaacaccaaggtggacaagaaagttgagcccaaatcttgtgacaaaactcacacatgcccaccgtgcccagcacctgaagctgcagggggaccgtcagtcttcctcttccccccaaaacccaaggacaccctcatgatctcccggacccctgaggtcacatgcgtggtggtggacgtgagccacgaagaccctgaggtcaagttcaactggtacgtggacggcgtggaggtgcataatgccaagacaaagccgcgggaggagcagtacaacagcacgtaccgtgtggtcagcgtcctcaccgtcctgcaccaggactggctgaatggcaaggagtacaagtgcaaggtctccaacaaagccctcggcgcccccatcgagaaaaccatctccaaagccaaagggcagccccgagaaccacaggtgtacaccctgcccccctgcagagatgagctgaccaagaaccaggtgtccctgtggtgtctggtcaagggcttctaccccagcgatatcgccgtggagtgggagagcaacggccagcctgagaacaactacaagaccaccccccctgtgctggacagcgacggcagcttcttcctgtactccaaactgaccgtggacaagagccggtggcagcagggcaacgtgttcagctgcagcgtgatgcacgaggccctgcacaaccactacacccagaagtccctgagcctgagccccggcggaggcggcggaagcggaggaggaggatctgggggcggaggttccggaggcggtggatctgagatcgtgctgacccagtctcccggcaccctgtctctgagccctggcgagagagccaccctgtcctgcagagcctcccagtccgtgacctcctcctacctcgcctggtatcagcagaagcccggccaggcccctcggctgctgatcaacgtgggcagtcggagagccaccggcatccctgaccggttctccggctctggctccggcaccgacttcaccctgaccatctcccggctggaacccgaggacttcgccgtgtactactgccagcagggcatcatgctgccccccacctttggccagggcaccaaggtggaaatcaag

SEQ ID NO: 346 - DNA, 2448 bp, Artificial Sequence
  DNA (25G7) VHCH1_VHCH1 Fc hole VH (4B9)
gaggtgcagctgctggaatctggcggcggactggtgcagcctggcggatctctgagactgagctgtgccgccagcggcttcaccttcagcagctacgccatgagctgggtgcgccaggcccctggaaaaggcctggaatgggtgtccgccatctctggcagcggcggcagcacctactacgccgattctgtgaagggccggttcaccatcagccgggacaacagcaagaacaccctgtacctgcagatgaacagcctgcgggccgaggacaccgccgtgtactattgcgccagggacgacccctggcccccctttgattattggggacagggcaccctcgtgaccgtgtccagcgcttctacaaagggccccagcgtgttccctctggcccctagcagcaagtctaccagcggaggaacagccgccctgggctgcctcgtgaaggactactttcccgagcccgtgacagtgtcctggaacagcggagccctgacaagcggcgtgcacacctttccagccgtgctgcagagcagcggcctgtactctctgagcagcgtcgtgactgtgcccagcagcagcctgggaacccagacctacatctgcaacgtgaaccacaagcccagcaacaccaaggtggacaagaaggtggaacccaagagctgcgacggcggaggcggatcaggcggcggaggatccgaagtgcagctgctggaaagtgggggaggcctggtgcagccagggggaagcctgagactgtcttgtgccgcttccggctttacctttagctcttacgccatgtcttgggtgcggcaggctccaggcaagggactggaatgggtgtcagctatcagcggctctggcggctccacatattacgccgacagcgtgaagggcagattcacaatctccagagacaactccaagaatactctgtacctgcagatgaattccctgcgcgccgaagatacagctgtgtattactgtgcccgcgacgatccttggccccctttcgactactgggggcagggaacactcgtgacagtgtcatccgctagcaccaagggcccatcggtcttccccctggcaccctcctccaagagcacctctgggggcacagcggccctgggctgcctggtcaaggactacttccccgaaccggtgacggtgtcgtggaactcaggcgccctgaccagcggcgtgcacaccttcccggctgtcctacagtcctcaggactctactccctcagcagcgtggtgaccgtgccctccagcagcttgggcacccagacctacatctgcaacgtgaatcacaagcccagcaacaccaaggtggacaagaaagttgagcccaaatcttgtgacaaaactcacacatgcccaccgtgcccagcacctgaagctgcagggggaccgtcagtcttcctcttccccccaaaacccaaggacaccctcatgatctcccggacccctgaggtcacatgcgtggtggtggacgtgagccacgaagaccctgaggtcaagttcaactggtacgtggacggcgtggaggtgcataatgccaagacaaagccgcgggaggagcagtacaacagcacgtaccgtgtggtcagcgtcctcaccgtcctgcaccaggactggctgaatggcaaggagtacaagtgcaaggtctccaacaaagccctcggcgcccccatcgagaaaaccatctccaaagccaaagggcagccccgagaaccacaggtgtgcaccctgcccccatcccgggatgagctgaccaagaaccaggtcagcctctcgtgcgcagtcaaaggcttctatcccagcgacatcgccgtggagtgggagagcaatgggcagccggagaacaactacaagaccacgcctcccgtgctggactccgacggctccttcttcctcgtgagcaagctcaccgtggacaagagcaggtggcagcaggggaacgtcttctcatgctccgtgatgcatgaggctctgcacaaccactacacgcagaagagcctctccctgtctccgggtggaggcggcggaagcggaggaggaggatccggcggcggaggttccggaggcggaggatccgaggtgcagctgctcgaaagcggcggaggactggtgcagcctggcggcagcctgagactgtcttgcgccgccagcggcttcaccttcagcagctacgccatgagctgggtccgccaggcccctggcaagggactggaatgggtgtccgccatcatcggctctggcgccagcacctactacgccgacagcgtgaagggccggttcaccatcagccgggacaacagcaagaacaccctgtacctgcagatgaacagcctgcgggccgaggacaccgccgtgtactactgcgccaagggatggttcggcggcttcaactactggggacagggcaccctggtcaccgtgtccagc

SEQ ID NO: 347 - protein, 807 aa, Artificial Sequence
  (25G7) VHCH1_VHCH1 Fc knob VL (4B9)
EVQLLESGGGLVQPGGSLRLSCAASGFTFSSYAMSWVRQAPGKGLEWVSAISGSGGSTYYADSVKGRFTISRDNSKNTLYLQMNSLRAEDTAVYYCARDDPWPPFDYWGQGTLVTVSSASTKGPSVFPLAPSSKSTSGGTAALGCLVKDYFPEPVTVSWNSGALTSGVHTFPAVLQSSGLYSLSSVVTVPSSSLGTQTYICNVNHKPSNTKVDKKVEPKSCDGGGGSGGGGSEVQLLESGGGLVQPGGSLRLSCAASGFTFSSYAMSWVRQAPGKGLEWVSAISGSGGSTYYADSVKGRFTISRDNSKNTLYLQMNSLRAEDTAVYYCARDDPWPPFDYWGQGTLVTVSSASTKGPSVFPLAPSSKSTSGGTAALGCLVKDYFPEPVTVSWNSGALTSGVHTFPAVLQSSGLYSLSSVVTVPSSSLGTQTYICNVNHKPSNTKVDKKVEPKSCDKTHTCPPCPAPEAAGGPSVFLFPPKPKDTLMISRTPEVTCVVVDVSHEDPEVKFNWYVDGVEVHNAKTKPREEQYNSTYRVVSVLTVLHQDWLNGKEYKCKVSNKALGAPIEKTISKAKGQPREPQVYTLPPCRDELTKNQVSLWCLVKGFYPSDIAVEWESNGQPENNYKTTPPVLDSDGSFFLYSKLTVDKSRWQQGNVFSCSVMHEALHNHYTQKSLSLSPGGGGGSGGGGSGGGGSGGGGSEIVLTQSPGTLSLSPGERATLSCRASQSVTSSYLAWYQQKPGQAPRLLINVGSRRATGIPDRFSGSGSGTDFTLTISRLEPEDFAVYYCQQGIMLPPTFGQGTKVEIK

SEQ ID NO: 348 - protein, 816 aa, Artificial Sequence
  (25G7) VHCH1_VHCH1 Fc hole VH (4B9)
EVQLLESGGGLVQPGGSLRLSCAASGFTFSSYAMSWVRQAPGKGLEWVSAISGSGGSTYYADSVKGRFTISRDNSKNTLYLQMNSLRAEDTAVYYCARDDPWPPFDYWGQGTLVTVSSASTKGPSVFPLAPSSKSTSGGTAALGCLVKDYFPEPVTVSWNSGALTSGVHTFPAVLQSSGLYSLSSVVTVPSSSLGTQTYICNVNHKPSNTKVDKKVEPKSCDGGGGSGGGGSEVQLLESGGGLVQPGGSLRLSCAASGFTFSSYAMSWVRQAPGKGLEWVSAISGSGGSTYYADSVKGRFTISRDNSKNTLYLQMNSLRAEDTAVYYCARDDPWPPFDYWGQGTLVTVSSASTKGPSVFPLAPSSKSTSGGTAALGCLVKDYFPEPVTVSWNSGALTSGVHTFPAVLQSSGLYSLSSVVTVPSSSLGTQTYICNVNHKPSNTKVDKKVEPKSCDKTHTCPPCPAPEAAGGPSVFLFPPKPKDTLMISRTPEVTCVVVDVSHEDPEVKFNWYVDGVEVHNAKTKPREEQYNSTYRVVSVLTVLHQDWLNGKEYKCKVSNKALGAPIEKTISKAKGQPREPQVCTLPPSRDELTKNQVSLSCAVKGFYPSDIAVEWESNGQPENNYKTTPPVLDSDGSFFLVSKLTVDKSRWQQGNVFSCSVMHEALHNHYTQKSLSLSPGGGGGSGGGGSGGGGSGGGGSEVQLLESGGGLVQPGGSLRLSCAASGFTFSSYAMSWVRQAPGKGLEWVSAIIGSGASTYYADSVKGRFTISRDNSKNTLYLQMNSLRAEDTAVYYCAKGWFGGFNYWGQGTLVTVSS

SEQ ID NO: 349 - DNA, 2427 bp, Artificial Sequence
  DNA (11D5) VHCH1_VHCH1 Fc knob VL (4B9)
caggtgcagctggtgcagtctggcgccgaagtgaagaaacccggcagcagcgtgaaggtgtcctgcaaggcttccggcggcaccttcagcagctacgccatttcttgggtgcgccaggcccctggacagggcctggaatggatgggcggcatcatccccatcttcggcaccgccaactacgcccagaaattccagggcagagtgaccatcaccgccgacaagagcaccagcaccgcctacatggaactgagcagcctgcggagcgaggacaccgccgtgtactactgtgccagaagcaccctgatctacggctacttcgactactggggccagggcaccaccgtgaccgtgtctagcgcttctaccaagggccccagcgtgttccctctggcccctagcagcaagagcacatctggcggaacagccgccctgggctgcctcgtgaaggactactttcccgagcccgtgacagtgtcctggaactctggcgccctgacaagcggcgtgcacacctttccagccgtgctgcagagcagcggcctgtactctctgagcagcgtcgtgactgtgcccagcagcagcctgggaacccagacctacatctgcaacgtgaaccacaagcccagcaacaccaaggtggacaagaaggtggaacccaagagctgcgacggcggaggcggatctggcggcggaggatcccaggtgcagctggtgcagagcggagctgaagtgaaaaagcctggctcctccgtgaaagtgtcttgtaaagccagcggcggcacattctcatcctacgccatcagctgggtgcggcaggctccaggccagggactggaatggatgggaggaattatccctatttttgggacagccaattatgctcagaaatttcaggggcgcgtgacaattacagccgacaagtccacctctacagcttatatggaactgtcctccctgcgctccgaggatacagctgtgtattactgcgcccggtccacactgatctatggatactttgattattgggggcagggaacaacagtgactgtgtcctccgctagcaccaagggcccatcggtcttccccctggcaccctcctccaagagcacctctgggggcacagcggccctgggctgcctggtcaaggactacttccccgaaccggtgacggtgtcgtggaactcaggcgccctgaccagcggcgtgcacaccttcccggctgtcctacagtcctcaggactctactccctcagcagcgtggtgaccgtgccctccagcagcttgggcacccagacctacatctgcaacgtgaatcacaagcccagcaacaccaaggtggacaagaaagttgagcccaaatcttgtgacaaaactcacacatgcccaccgtgcccagcacctgaagctgcagggggaccgtcagtcttcctcttccccccaaaacccaaggacaccctcatgatctcccggacccctgaggtcacatgcgtggtggtggacgtgagccacgaagaccctgaggtcaagttcaactggtacgtggacggcgtggaggtgcataatgccaagacaaagccgcgggaggagcagtacaacagcacgtaccgtgtggtcagcgtcctcaccgtcctgcaccaggactggctgaatggcaaggagtacaagtgcaaggtctccaacaaagccctcggcgcccccatcgagaaaaccatctccaaagccaaagggcagccccgagaaccacaggtgtacaccctgcccccctgcagagatgagctgaccaagaaccaggtgtccctgtggtgtctggtcaagggcttctaccccagcgatatcgccgtggagtgggagagcaacggccagcctgagaacaactacaagaccaccccccctgtgctggacagcgacggcagcttcttcctgtactccaaactgaccgtggacaagagccggtggcagcagggcaacgtgttcagctgcagcgtgatgcacgaggccctgcacaaccactacacccagaagtccctgagcctgagccccggcggaggcggcggaagcggaggaggaggatctgggggcggaggttccggaggcggtggatctgagatcgtgctgacccagtctcccggcaccctgtctctgagccctggcgagagagccaccctgtcctgcagagcctcccagtccgtgacctcctcctacctcgcctggtatcagcagaagcccggccaggcccctcggctgctgatcaacgtgggcagtcggagagccaccggcatccctgaccggttctccggctctggctccggcaccgacttcaccctgaccatctcccggctggaacccgaggacttcgccgtgtactactgccagcagggcatcatgctgccccccacctttggccagggcaccaaggtggaaatcaag

SEQ ID NO: 350 - DNA, 2454 bp, Artificial Sequence
  DNA (11D5) VHCH1_VHCH1 Fc hole VH (4B9)
caggtgcagctggtgcagtctggcgccgaagtgaagaaacccggcagcagcgtgaaggtgtcctgcaaggcttccggcggcaccttcagcagctacgccatttcttgggtgcgccaggcccctggacagggcctggaatggatgggcggcatcatccccatcttcggcaccgccaactacgcccagaaattccagggcagagtgaccatcaccgccgacaagagcaccagcaccgcctacatggaactgagcagcctgcggagcgaggacaccgccgtgtactactgtgccagaagcaccctgatctacggctacttcgactactggggccagggcaccaccgtgaccgtgtctagcgcttctaccaagggccccagcgtgttccctctggcccctagcagcaagagcacatctggcggaacagccgccctgggctgcctcgtgaaggactactttcccgagcccgtgacagtgtcctggaactctggcgccctgacaagcggcgtgcacacctttccagccgtgctgcagagcagcggcctgtactctctgagcagcgtcgtgactgtgcccagcagcagcctgggaacccagacctacatctgcaacgtgaaccacaagcccagcaacaccaaggtggacaagaaggtggaacccaagagctgcgacggcggaggcggatctggcggcggaggatcccaggtgcagctggtgcagagcggagctgaagtgaaaaagcctggctcctccgtgaaagtgtcttgtaaagccagcggcggcacattctcatcctacgccatcagctgggtgcggcaggctccaggccagggactggaatggatgggaggaattatccctatttttgggacagccaattatgctcagaaatttcaggggcgcgtgacaattacagccgacaagtccacctctacagcttatatggaactgtcctccctgcgctccgaggatacagctgtgtattactgcgcccggtccacactgatctatggatactttgattattgggggcagggaacaacagtgactgtgtcctccgctagcaccaagggcccatcggtcttccccctggcaccctcctccaagagcacctctgggggcacagcggccctgggctgcctggtcaaggactacttccccgaaccggtgacggtgtcgtggaactcaggcgccctgaccagcggcgtgcacaccttcccggctgtcctacagtcctcaggactctactccctcagcagcgtggtgaccgtgccctccagcagcttgggcacccagacctacatctgcaacgtgaatcacaagcccagcaacaccaaggtggacaagaaagttgagcccaaatcttgtgacaaaactcacacatgcccaccgtgcccagcacctgaagctgcagggggaccgtcagtcttcctcttccccccaaaacccaaggacaccctcatgatctcccggacccctgaggtcacatgcgtggtggtggacgtgagccacgaagaccctgaggtcaagttcaactggtacgtggacggcgtggaggtgcataatgccaagacaaagccgcgggaggagcagtacaacagcacgtaccgtgtggtcagcgtcctcaccgtcctgcaccaggactggctgaatggcaaggagtacaagtgcaaggtctccaacaaagccctcggcgcccccatcgagaaaaccatctccaaagccaaagggcagccccgagaaccacaggtgtgcaccctgcccccatcccgggatgagctgaccaagaaccaggtcagcctctcgtgcgcagtcaaaggcttctatcccagcgacatcgccgtggagtgggagagcaatgggcagccggagaacaactacaagaccacgcctcccgtgctggactccgacggctccttcttcctcgtgagcaagctcaccgtggacaagagcaggtggcagcaggggaacgtcttctcatgctccgtgatgcatgaggctctgcacaaccactacacgcagaagagcctctccctgtctccgggtggaggcggcggaagcggaggaggaggatccggcggcggaggttccggaggcggaggatccgaggtgcagctgctcgaaagcggcggaggactggtgcagcctggcggcagcctgagactgtcttgcgccgccagcggcttcaccttcagcagctacgccatgagctgggtccgccaggcccctggcaagggactggaatgggtgtccgccatcatcggctctggcgccagcacctactacgccgacagcgtgaagggccggttcaccatcagccgggacaacagcaagaacaccctgtacctgcagatgaacagcctgcgggccgaggacaccgccgtgtactactgcgccaagggatggttcggcggcttcaactactggggacagggcaccctggtcaccgtgtccagc

SEQ ID NO: 351 - protein, 809 aa, Artificial Sequence
  (11D5) VHCH1_VHCH1 Fc knob VL (4B9)
QVQLVQSGAEVKKPGSSVKVSCKASGGTFSSYAISWVRQAPGQGLEWMGGIIPIFGTANYAQKFQGRVTITADKSTSTAYMELSSLRSEDTAVYYCARSTLIYGYFDYWGQGTTVTVSSASTKGPSVFPLAPSSKSTSGGTAALGCLVKDYFPEPVTVSWNSGALTSGVHTFPAVLQSSGLYSLSSVVTVPSSSLGTQTYICNVNHKPSNTKVDKKVEPKSCDGGGGSGGGGSQVQLVQSGAEVKKPGSSVKVSCKASGGTFSSYAISWVRQAPGQGLEWMGGIIPIFGTANYAQKFQGRVTITADKSTSTAYMELSSLRSEDTAVYYCARSTLIYGYFDYWGQGTTVTVSSASTKGPSVFPLAPSSKSTSGGTAALGCLVKDYFPEPVTVSWNSGALTSGVHTFPAVLQSSGLYSLSSVVTVPSSSLGTQTYICNVNHKPSNTKVDKKVEPKSCDKTHTCPPCPAPEAAGGPSVFLFPPKPKDTLMISRTPEVTCVVVDVSHEDPEVKFNWYVDGVEVHNAKTKPREEQYNSTYRVVSVLTVLHQDWLNGKEYKCKVSNKALGAPIEKTISKAKGQPREPQVYTLPPCRDELTKNQVSLWCLVKGFYPSDIAVEWESNGQPENNYKTTPPVLDSDGSFFLYSKLTVDKSRWQQGNVFSCSVMHEALHNHYTQKSLSLSPGGGGGSGGGGSGGGGSGGGGSEIVLTQSPGTLSLSPGERATLSCRASQSVTSSYLAWYQQKPGQAPRLLINVGSRRATGIPDRFSGSGSGTDFTLTISRLEPEDFAVYYCQQGIMLPPTFGQGTKVEIK

SEQ ID NO: 352 - protein, 818 aa, Artificial Sequence
  (11D5) VHCH1_VHCH1 Fc hole VH (4B9)
QVQLVQSGAEVKKPGSSVKVSCKASGGTFSSYAISWVRQAPGQGLEWMGGIIPIFGTANYAQKFQGRVTITADKSTSTAYMELSSLRSEDTAVYYCARSTLIYGYFDYWGQGTTVTVSSASTKGPSVFPLAPSSKSTSGGTAALGCLVKDYFPEPVTVSWNSGALTSGVHTFPAVLQSSGLYSLSSVVTVPSSSLGTQTYICNVNHKPSNTKVDKKVEPKSCDGGGGSGGGGSQVQLVQSGAEVKKPGSSVKVSCKASGGTFSSYAISWVRQAPGQGLEWMGGIIPIFGTANYAQKFQGRVTITADKSTSTAYMELSSLRSEDTAVYYCARSTLIYGYFDYWGQGTTVTVSSASTKGPSVFPLAPSSKSTSGGTAALGCLVKDYFPEPVTVSWNSGALTSGVHTFPAVLQSSGLYSLSSVVTVPSSSLGTQTYICNVNHKPSNTKVDKKVEPKSCDKTHTCPPCPAPEAAGGPSVFLFPPKPKDTLMISRTPEVTCVVVDVSHEDPEVKFNWYVDGVEVHNAKTKPREEQYNSTYRVVSVLTVLHQDWLNGKEYKCKVSNKALGAPIEKTISKAKGQPREPQVCTLPPSRDELTKNQVSLSCAVKGFYPSDIAVEWESNGQPENNYKTTPPVLDSDGSFFLVSKLTVDKSRWQQGNVFSCSVMHEALHNHYTQKSLSLSPGGGGGSGGGGSGGGGSGGGGSEVQLLESGGGLVQPGGSLRLSCAASGFTFSSYAMSWVRQAPGKGLEWVSAIIGSGASTYYADSVKGRFTISRDNSKNTLYLQMNSLRAEDTAVYYCAKGWFGGFNYWGQGTLVTVSS

SEQ ID NO: 353 - DNA, 2433 bp, Artificial Sequence
  DNA (9B11) VHCH1_VHCH1 Fc knob VL (4B9)
caggtgcaattggtgcagtctggggctgaggtgaagaagcctgggtcctcggtgaaggtctcctgcaaggcctccggaggcacattcagcagctacgctataagctgggtgcgacaggcccctggacaagggctcgagtggatgggagggatcatccctatctttggtacagcaaactacgcacagaagttccagggcagggtcaccattactgcagacaaatccacgagcacagcctacatggagctgagcagcctgagatctgaggacaccgccgtgtattactgtgcgagatcttctggtgcttacccgggttacttcgactactggggccaagggaccaccgtgaccgtctcctcagcttctaccaagggccccagcgtgttccctctggcccctagcagcaagagcacatctggcggaacagccgccctgggctgcctcgtgaaggactactttcccgagcccgtgacagtgtcctggaactctggcgccctgacaagcggcgtgcacacctttccagccgtgctgcagagcagcggcctgtactctctgagcagcgtcgtgactgtgcccagcagcagcctgggaacccagacctacatctgcaacgtgaaccacaagcccagcaacaccaaggtggacaagaaggtggaacccaagagctgcgacggcggaggcggatctggcggcggaggatcccaggtgcaattggtgcagtctggggctgaggtgaagaagcctgggtcctcggtgaaggtctcctgcaaggcctccggaggcacattcagcagctacgctataagctgggtgcgacaggcccctggacaagggctcgagtggatgggagggatcatccctatctttggtacagcaaactacgcacagaagttccagggcagggtcaccattactgcagacaaatccacgagcacagcctacatggagctgagcagcctgagatctgaggacaccgccgtgtattactgtgcgagatcttctggtgcttacccgggttacttcgactactggggccaagggaccaccgtgaccgtctcctcagctagcaccaagggcccatcggtcttccccctggcaccctcctccaagagcacctctgggggcacagcggccctgggctgcctggtcaaggactacttccccgaaccggtgacggtgtcgtggaactcaggcgccctgaccagcggcgtgcacaccttcccggctgtcctacagtcctcaggactctactccctcagcagcgtggtgaccgtgccctccagcagcttgggcacccagacctacatctgcaacgtgaatcacaagcccagcaacaccaaggtggacaagaaagttgagcccaaatcttgtgacaaaactcacacatgcccaccgtgcccagcacctgaagctgcagggggaccgtcagtcttcctcttccccccaaaacccaaggacaccctcatgatctcccggacccctgaggtcacatgcgtggtggtggacgtgagccacgaagaccctgaggtcaagttcaactggtacgtggacggcgtggaggtgcataatgccaagacaaagccgcgggaggagcagtacaacagcacgtaccgtgtggtcagcgtcctcaccgtcctgcaccaggactggctgaatggcaaggagtacaagtgcaaggtctccaacaaagccctcggcgcccccatcgagaaaaccatctccaaagccaaagggcagccccgagaaccacaggtgtacaccctgcccccctgcagagatgagctgaccaagaaccaggtgtccctgtggtgtctggtcaagggcttctaccccagcgatatcgccgtggagtgggagagcaacggccagcctgagaacaactacaagaccaccccccctgtgctggacagcgacggcagcttcttcctgtactccaaactgaccgtggacaagagccggtggcagcagggcaacgtgttcagctgcagcgtgatgcacgaggccctgcacaaccactacacccagaagtccctgagcctgagccccggcggaggcggcggaagcggaggaggaggatctgggggcggaggttccggaggcggtggatctgagatcgtgctgacccagtctcccggcaccctgtctctgagccctggcgagagagccaccctgtcctgcagagcctcccagtccgtgacctcctcctacctcgcctggtatcagcagaagcccggccaggcccctcggctgctgatcaacgtgggcagtcggagagccaccggcatccctgaccggttctccggctctggctccggcaccgacttcaccctgaccatctcccggctggaacccgaggacttcgccgtgtactactgccagcagggcatcatgctgccccccacctttggccagggcaccaaggtggaaatcaag

SEQ ID NO: 354 - DNA, 2460 bp, Artificial Sequence
  DNA (9B11) VHCH1_VHCH1 Fc hole VH (4B9)
caggtgcaattggtgcagtctggggctgaggtgaagaagcctgggtcctcggtgaaggtctcctgcaaggcctccggaggcacattcagcagctacgctataagctgggtgcgacaggcccctggacaagggctcgagtggatgggagggatcatccctatctttggtacagcaaactacgcacagaagttccagggcagggtcaccattactgcagacaaatccacgagcacagcctacatggagctgagcagcctgagatctgaggacaccgccgtgtattactgtgcgagatcttctggtgcttacccgggttacttcgactactggggccaagggaccaccgtgaccgtctcctcagcttctaccaagggccccagcgtgttccctctggcccctagcagcaagagcacatctggcggaacagccgccctgggctgcctcgtgaaggactactttcccgagcccgtgacagtgtcctggaactctggcgccctgacaagcggcgtgcacacctttccagccgtgctgcagagcagcggcctgtactctctgagcagcgtcgtgactgtgcccagcagcagcctgggaacccagacctacatctgcaacgtgaaccacaagcccagcaacaccaaggtggacaagaaggtggaacccaagagctgcgacggcggaggcggatctggcggcggaggatcccaggtgcaattggtgcagtctggggctgaggtgaagaagcctgggtcctcggtgaaggtctcctgcaaggcctccggaggcacattcagcagctacgctataagctgggtgcgacaggcccctggacaagggctcgagtggatgggagggatcatccctatctttggtacagcaaactacgcacagaagttccagggcagggtcaccattactgcagacaaatccacgagcacagcctacatggagctgagcagcctgagatctgaggacaccgccgtgtattactgtgcgagatcttctggtgcttacccgggttacttcgactactggggccaagggaccaccgtgaccgtctcctcagctagcaccaagggcccatcggtcttccccctggcaccctcctccaagagcacctctgggggcacagcggccctgggctgcctggtcaaggactacttccccgaaccggtgacggtgtcgtggaactcaggcgccctgaccagcggcgtgcacaccttcccggctgtcctacagtcctcaggactctactccctcagcagcgtggtgaccgtgccctccagcagcttgggcacccagacctacatctgcaacgtgaatcacaagcccagcaacaccaaggtggacaagaaagttgagcccaaatcttgtgacaaaactcacacatgcccaccgtgcccagcacctgaagctgcagggggaccgtcagtcttcctcttccccccaaaacccaaggacaccctcatgatctcccggacccctgaggtcacatgcgtggtggtggacgtgagccacgaagaccctgaggtcaagttcaactggtacgtggacggcgtggaggtgcataatgccaagacaaagccgcgggaggagcagtacaacagcacgtaccgtgtggtcagcgtcctcaccgtcctgcaccaggactggctgaatggcaaggagtacaagtgcaaggtctccaacaaagccctcggcgcccccatcgagaaaaccatctccaaagccaaagggcagccccgagaaccacaggtgtgcaccctgcccccatcccgggatgagctgaccaagaaccaggtcagcctctcgtgcgcagtcaaaggcttctatcccagcgacatcgccgtggagtgggagagcaatgggcagccggagaacaactacaagaccacgcctcccgtgctggactccgacggctccttcttcctcgtgagcaagctcaccgtggacaagagcaggtggcagcaggggaacgtcttctcatgctccgtgatgcatgaggctctgcacaaccactacacgcagaagagcctctccctgtctccgggtggaggcggcggaagcggaggaggaggatccggcggcggaggttccggaggcggaggatccgaggtgcagctgctcgaaagcggcggaggactggtgcagcctggcggcagcctgagactgtcttgcgccgccagcggcttcaccttcagcagctacgccatgagctgggtccgccaggcccctggcaagggactggaatgggtgtccgccatcatcggctctggcgccagcacctactacgccgacagcgtgaagggccggttcaccatcagccgggacaacagcaagaacaccctgtacctgcagatgaacagcctgcgggccgaggacaccgccgtgtactactgcgccaagggatggttcggcggcttcaactactggggacagggcaccctggtcaccgtgtccagc

SEQ ID NO: 355 - protein, 811 aa, Artificial Sequence
  (9B11) VHCH1_VHCH1 Fc knob VL (4B9)
QVQLVQSGAEVKKPGSSVKVSCKASGGTFSSYAISWVRQAPGQGLEWMGGIIPIFGTANYAQKFQGRVTITADKSTSTAYMELSSLRSEDTAVYYCARSSGAYPGYFDYWGQGTTVTVSSASTKGPSVFPLAPSSKSTSGGTAALGCLVKDYFPEPVTVSWNSGALTSGVHTFPAVLQSSGLYSLSSVVTVPSSSLGTQTYICNVNHKPSNTKVDKKVEPKSCDGGGGSGGGGSQVQLVQSGAEVKKPGSSVKVSCKASGGTFSSYAISWVRQAPGQGLEWMGGIIPIFGTANYAQKFQGRVTITADKSTSTAYMELSSLRSEDTAVYYCARSSGAYPGYFDYWGQGTTVTVSSASTKGPSVFPLAPSSKSTSGGTAALGCLVKDYFPEPVTVSWNSGALTSGVHTFPAVLQSSGLYSLSSVVTVPSSSLGTQTYICNVNHKPSNTKVDKKVEPKSCDKTHTCPPCPAPEAAGGPSVFLFPPKPKDTLMISRTPEVTCVVVDVSHEDPEVKFNWYVDGVEVHNAKTKPREEQYNSTYRVVSVLTVLHQDWLNGKEYKCKVSNKALGAPIEKTISKAKGQPREPQVYTLPPCRDELTKNQVSLWCLVKGFYPSDIAVEWESNGQPENNYKTTPPVLDSDGSFFLYSKLTVDKSRWQQGNVFSCSVMHEALHNHYTQKSLSLSPGGGGGSGGGGSGGGGSGGGGSEIVLTQSPGTLSLSPGERATLSCRASQSVTSSYLAWYQQKPGQAPRLLINVGSRRATGIPDRFSGSGSGTDFTLTISRLEPEDFAVYYCQQGIMLPPTFGQGTKVEIK

SEQ ID NO: 356 - protein, 820 aa, Artificial Sequence
  (9B11) VHCH1_VHCH1 Fc hole VH (4B9)
QVQLVQSGAEVKKPGSSVKVSCKASGGTFSSYAISWVRQAPGQGLEWMGGIIPIFGTANYAQKFQGRVTITADKSTSTAYMELSSLRSEDTAVYYCARSSGAYPGYFDYWGQGTTVTVSSASTKGPSVFPLAPSSKSTSGGTAALGCLVKDYFPEPVTVSWNSGALTSGVHTFPAVLQSSGLYSLSSVVTVPSSSLGTQTYICNVNHKPSNTKVDKKVEPKSCDGGGGSGGGGSQVQLVQSGAEVKKPGSSVKVSCKASGGTFSSYAISWVRQAPGQGLEWMGGIIPIFGTANYAQKFQGRVTITADKSTSTAYMELSSLRSEDTAVYYCARSSGAYPGYFDYWGQGTTVTVSSASTKGPSVFPLAPSSKSTSGGTAALGCLVKDYFPEPVTVSWNSGALTSGVHTFPAVLQSSGLYSLSSVVTVPSSSLGTQTYICNVNHKPSNTKVDKKVEPKSCDKTHTCPPCPAPEAAGGPSVFLFPPKPKDTLMISRTPEVTCVVVDVSHEDPEVKFNWYVDGVEVHNAKTKPREEQYNSTYRVVSVLTVLHQDWLNGKEYKCKVSNKALGAPIEKTISKAKGQPREPQVCTLPPSRDELTKNQVSLSCAVKGFYPSDIAVEWESNGQPENNYKTTPPVLDSDGSFFLVSKLTVDKSRWQQGNVFSCSVMHEALHNHYTQKSLSLSPGGGGGSGGGGSGGGGSGGGGSEVQLLESGGGLVQPGGSLRLSCAASGFTFSSYAMSWVRQAPGKGLEWVSAIIGSGASTYYADSVKGRFTISRDNSKNTLYLQMNSLRAEDTAVYYCAKGWFGGFNYWGQGTLVTVSS

SEQ ID NO: 357 - protein, 137 aa, Homo sapiens
QRPTGGPGCGPGRLLLGTGTDARCCRVHTTRCCRDYPGEECCSEWDCMCVQPEFHCGDPCCTTCRHHPCPPGQGVQSQGKFSFGFQCIDCASGTFSGGHEGHCKPWTDCTQFGFLTVFPGNKTHNAVCVPGSPPAEP

SEQ ID NO: 358 - protein, 137 aa, Cynomolgus
QRPTGGPGCGPGRLLLGTGKDARCCRVHPTRCCRDYQGEECCSEWDCVCVQPEFHCGNPCCTTCQHHPCPSGQGVQPQGKFSFGFRCVDCALGTFSRGHDGHCKPWTDCTQFGFLTVFPGNKTHNAVCVPGSPPAEP

SEQ ID NO: 359 - protein, 132 aa, Mus musculus
SVVEEPGCGPGKVQNGSGNNTRCCSLYAPGKEDCPKERCICVTPEYHCGDPQCKICKHYPCQPGQRVESQGDIVFGFRCVACAMGTFSAGRDGHCRLWTNCSQFGFLTMFPGNKTHNAVCIPEPLPTEQYGH

SEQ ID NO: 360 - DNA, 1188 bp, Artificial Sequence
  DNA human GITR antigen Fc knob chain
cagaggcccacaggcggccctggctgtggacctggcagactgctgctgggcaccggcaccgatgcaagatgctgtagagtgcacaccaccagatgctgccgggactaccctggcgaagagtgctgcagcgagtgggactgtatgtgcgtgcagcccgagttccactgcggcgacccctgctgcaccacctgtagacaccacccttgccctcccggccagggcgtgcagagccagggcaagttcagcttcggcttccagtgcatcgactgcgccagcggcaccttctctggcggccacgagggacactgcaagccctggaccgactgtacccagttcggcttcctgaccgtgttccccggcaacaagacccacaacgccgtgtgcgtgcccggcagccctcctgctgaagtcgacggtggtagtccgacacctccgacacccgggggtggttctgcagacaaaactcacacatgcccaccgtgcccagcacctgaactcctggggggaccgtcagtcttcctcttccccccaaaacccaaggacaccctcatgatctcccggacccctgaggtcacatgcgtggtggtggacgtgagccacgaagaccctgaggtcaagttcaactggtacgtggacggcgtggaggtgcataatgccaagacaaagccgcgggaggagcagtacaacagcacgtaccgtgtggtcagcgtcctcaccgtcctgcaccaggactggctgaatggcaaggagtacaagtgcaaggtctccaacaaagccctcccagcccccatcgagaaaaccatctccaaagccaaagggcagccccgagaaccacaggtgtacaccctgcccccatgccgggatgagctgaccaagaaccaggtcagcctgtggtgcctggtcaaaggcttctatcccagcgacatcgccgtggagtgggagagcaatgggcagccggagaacaactacaagaccacgcctcccgtgctggactccgacggctccttcttcctctacagcaagctcaccgtggacaagagcaggtggcagcaggggaacgtcttctcatgctccgtgatgcatgaggctctgcacaaccactacacgcagaagagcctctccctgtctccgggtaaatccggaggcctgaacgacatcttcgaggcccagaagattgaatggcacgag

SEQ ID NO: 361 - DNA, 1191 bp, Artificial Sequence
  DNA cynomolgus GITR antigen Fc knob chain
cagaggcctacaggcggccctggatgtggacctggcagactgctgctgggcacaggcaaggatgcccggtgctgtagagtgcaccccaccagatgctgccgggactaccagggcgaggagtgctgcagcgagtgggactgcgtgtgcgtgcagcctgagttccactgcggcaacccctgctgcaccacctgtcagcaccacccttgtcctagcggacagggcgtgcagccccagggcaagttcagcttcggcttcagatgcgtggactgcgccctgggcaccttcagcagaggacacgatggccactgcaagccctggaccgactgtacccagttcggcttcctgaccgtgttccccggcaacaagacccacaacgccgtgtgtgtgcctggcagccctcctgctgaacctgtcgacggtggtagtccgacacctccgacacccgggggtggttctgcagacaaaactcacacatgcccaccgtgcccagcacctgaactcctggggggaccgtcagtcttcctcttccccccaaaacccaaggacaccctcatgatctcccggacccctgaggtcacatgcgtggtggtggacgtgagccacgaagaccctgaggtcaagttcaactggtacgtggacggcgtggaggtgcataatgccaagacaaagccgcgggaggagcagtacaacagcacgtaccgtgtggtcagcgtcctcaccgtcctgcaccaggactggctgaatggcaaggagtacaagtgcaaggtctccaacaaagccctcccagcccccatcgagaaaaccatctccaaagccaaagggcagccccgagaaccacaggtgtacaccctgcccccatgccgggatgagctgaccaagaaccaggtcagcctgtggtgcctggtcaaaggcttctatcccagcgacatcgccgtggagtgggagagcaatgggcagccggagaacaactacaagaccacgcctcccgtgctggactccgacggctccttcttcctctacagcaagctcaccgtggacaagagcaggtggcagcaggggaacgtcttctcatgctccgtgatgcatgaggctctgcacaaccactacacgcagaagagcctctccctgtctccgggtaaatccggaggcctgaacgacatcttcgaggcccagaagattgaatggcacgag

SEQ ID NO: 362 - DNA, 1176 bp, Artificial Sequence
  DNA murine GITR antigen Fc knob chain
agcgtggtggaagaacccggctgcggccctggcaaggtgcagaatggcagcggcaacaacacccggtgctgcagcctgtacgcccctggcaaagaggactgccccaaagaacggtgcatctgcgtgacccccgagtaccactgcggcgacccccagtgcaaaatctgcaagcactacccctgccagcccggccagcgggtcgaaagccagggcgatatcgtgttcggcttcagatgcgtggcctgcgccatgggcaccttcagcgccggcagagatggccactgcagactgtggaccaactgcagccagttcggcttcctgaccatgttccccggcaacaagacccacaacgccgtgtgcatccccgagcccctgcccacagagcagtacggccatgtcgacggtggtagtccgacacctccgacacccgggggtggttctgcagacaaaactcacacatgcccaccgtgcccagcacctgaactcctggggggaccgtcagtcttcctcttccccccaaaacccaaggacaccctcatgatctcccggacccctgaggtcacatgcgtggtggtggacgtgagccacgaagaccctgaggtcaagttcaactggtacgtggacggcgtggaggtgcataatgccaagacaaagccgcgggaggagcagtacaacagcacgtaccgtgtggtcagcgtcctcaccgtcctgcaccaggactggctgaatggcaaggagtacaagtgcaaggtctccaacaaagccctcccagcccccatcgagaaaaccatctccaaagccaaagggcagccccgagaaccacaggtgtacaccctgcccccatgccgggatgagctgaccaagaaccaggtcagcctgtggtgcctggtcaaaggcttctatcccagcgacatcgccgtggagtgggagagcaatgggcagccggagaacaactacaagaccacgcctcccgtgctggactccgacggctccttcttcctctacagcaagctcaccgtggacaagagcaggtggcagcaggggaacgtcttctcatgctccgtgatgcatgaggctctgcacaaccactacacgcagaagagcctctccctgtctccgggtaaatccggaggcctgaacgacatcttcgaggcccagaagattgaatggcacgag

SEQ ID NO: 363 - protein, 397 aa, Artificial Sequence
  human GITR antigen Fc knob chain
QRPTGGPGCGPGRLLLGTGTDARCCRVHTTRCCRDYPGEECCSEWDCMCVQPEFHCGDPCCTTCRHHPCPPGQGVQSQGKFSFGFQCIDCASGTFSGGHEGHCKPWTDCTQFGFLTVFPGNKTHNAVCVPGSPPAEPVDGGSPTPPTPGGGSADKTHTCPPCPAPELLGGPSVFLFPPKPKDTLMISRTPEVTCVVVDVSHEDPEVKFNWYVDGVEVHNAKTKPREEQYNSTYRVVSVLTVLHQDWLNGKEYKCKVSNKALPAPIEKTISKAKGQPREPQVYTLPPCRDELTKNQVSLWCLVKGFYPSDIAVEWESNGQPENNYKTTPPVLDSDGSFFLYSKLTVDKSRWQQGNVFSCSVMHEALHNHYTQKSLSLSPGKSGGLNDIFEAQKIEWHE

SEQ ID NO: 364 - protein, 397 aa, Artificial Sequence
  cynomolgus GITR antigen Fc knob chain
QRPTGGPGCGPGRLLLGTGKDARCCRVHPTRCCRDYQGEECCSEWDCVCVQPEFHCGNPCCTTCQHHPCPSGQGVQPQGKFSFGFRCVDCALGTFSRGHDGHCKPWTDCTQFGFLTVFPGNKTHNAVCVPGSPPAEPVDGGSPTPPTPGGGSADKTHTCPPCPAPELLGGPSVFLFPPKPKDTLMISRTPEVTCVVVDVSHEDPEVKFNWYVDGVEVHNAKTKPREEQYNSTYRVVSVLTVLHQDWLNGKEYKCKVSNKALPAPIEKTISKAKGQPREPQVYTLPPCRDELTKNQVSLWCLVKGFYPSDIAVEWESNGQPENNYKTTPPVLDSDGSFFLYSKLTVDKSRWQQGNVFSCSVMHEALHNHYTQKSLSLSPGKSGGLNDIFEAQKIEWHE

SEQ ID NO: 365 - protein, 392 aa, Artificial Sequence
  murine GITR antigen Fc knob chain
SVVEEPGCGPGKVQNGSGNNTRCCSLYAPGKEDCPKERCICVTPEYHCGDPQCKICKHYPCQPGQRVESQGDIVFGFRCVACAMGTFSAGRDGHCRLWTNCSQFGFLTMFPGNKTHNAVCIPEPLPTEQYGHVDGGSPTPPTPGGGSADKTHTCPPCPAPELLGGPSVFLFPPKPKDTLMISRTPEVTCVVVDVSHEDPEVKFNWYVDGVEVHNAKTKPREEQYNSTYRVVSVLTVLHQDWLNGKEYKCKVSNKALPAPIEKTISKAKGQPREPQVYTLPPCRDELTKNQVSLWCLVKGFYPSDIAVEWESNGQPENNYKTTPPVLDSDGSFFLYSKLTVDKSRWQQGNVFSCSVMHEALHNHYTQKSLSLSPGKSGGLNDIFEAQKIEWHE

SEQ ID NO: 366 - protein, 242 aa, Artificial Sequence; identical to SEQ ID NO: 131
  Fab light chain Vl3_19 template

SEQ ID NO: 367 - protein, 240 aa, Artificial Sequence; identical to SEQ ID NO: 107
  Fab heavy chain VH1_69 template

SEQ ID NO: 368 - DNA, 726 bp, Artificial Sequence; identical to SEQ ID NO: 130
  DNA Fab light chain Vl3_19 template

SEQ ID NO: 369 - DNA, 720 bp, Artificial Sequence; identical to SEQ ID NO: 106
  DNA Fab heavy chain VH1_69 template

SEQ ID NO: 370 - DNA, 1617 bp, Artificial Sequence
  DNA pRJH52 Fab sequence
atgaaatacctattgcctacggcagccgctggattgttattactcgcggcccagccggccatggcctcgtctgagctgactcaggaccctgctgtgtctgtggccttgggacagacagtcaggatcacatgccaaggagacagcctcagaagttattatgcaagctggtaccagcagaagccaggacaggcccctgtacttgtcatctatggtaaaaacaaccggccctcagggatcccagaccgattctctggctccagctcaggaaacacagcttccttgaccatcactggggctcaggcggaagatgaggctgactattactgtaactcccgtgatagtagcggtaatcatgtggtattcggcggagggaccaagctgaccgtcctaggacaacccaaggctgcccccagcgtgaccctgttcccccccagcagcgaggaattgcaggccaacaaggccaccctggtctgcctgatcagcgacttctacccaggcgccgtgaccgtggcctggaaggccgacagcagccccgtgaaggccggcgtggagaccaccacccccagcaagcagagcaacaacaagtacgccgccagcagctacctgagcctgacccccgagcagtggaagagccacaggtcctacagctgccaggtgacccacgagggcagcaccgtggagaaaaccgtggcccccaccgagtgcagcggagccgcagaacaaaaactcatctcagaagaggatctgaatggagccgcagactacaaggacgacgacgacaagggtgccgcataataaggcgcgccaattctatttcaaggagacagtcatatgaaatacctgctgccgaccgctgctgctggtctgctgctcctcgctgcccagccggcgatggcccaggtgcaattggtgcagtctggggctgaggtgaagaagcctgggtcctcggtgaaggtctcctgcaaggcctccggaggcacattcagcagctacgctataagctgggtgcgacaggcccctggacaagggctcgagtggatgggagggatcatccctatctttggtacagcaaactacgcacagaagttccagggcagggtcaccattactgcagacaaatccacgagcacagcctacatggagctgagcagcctgagatctgaggacaccgccgtgtattactgtgcgagactatccccaggcggttactatgttatggatgcctggggccaagggaccaccgtgaccgtctcctcagctagcaccaaaggcccatcggtcttccccctggcaccctcctccaagagcacctctgggggcacagcggccctgggctgcctggtcaaggactacttccccgaaccggtgacggtgtcgtggaactcaggcgccctgaccagcggcgtgcacaccttcccggctgtcctacagtcctcaggactctactccctcagcagcgtggtgaccgtgccctccagcagcttgggcacccagacctacatctgcaacgtgaatcacaagcccagcaacaccaaagtggacaagaaagttgagcccaaatcttgtgacgcggccgcaagcactagtgcccatcaccatcaccatcacgccgcggca

SEQ ID NO: 371 - protein, 5 aa, Artificial Sequence
  GITR(8A06)  CDR-H1
SYAIS

SEQ ID NO: 372 - protein, 17 aa, Artificial Sequence
  GITR(8A06)  CDR-H2
GIIPIFGTANYAQKFQG

SEQ ID NO: 373 - protein, 7 aa, Artificial Sequence
  GITR(8A06)  CDR-H3
GYYAIDY

SEQ ID NO: 374 - protein, 11 aa, Artificial Sequence
  GITR(8A06)  CDR-L1
QGDSLRSYYAS

SEQ ID NO: 375 - protein, 7 aa, Artificial Sequence
  GITR(8A06)  CDR-L2
GKNNRPS

SEQ ID NO: 376 - protein, 10 aa, Artificial Sequence
  GITR(8A06)  CDR-L3
NSPQTSGSAV

SEQ ID NO: 377 - protein, 7 aa, Artificial Sequence
  GITR(6C8)  CDR-H1
TSGMGVG

SEQ ID NO: 378 - protein, 16 aa, Artificial Sequence
  GITR(6C8)  CDR-H2
HIWWDDDKYYQPSLKS

SEQ ID NO: 379 - protein, 9 aa, Artificial Sequence
  GITR(6C8)  CDR-H3
TRRYFPFAY

SEQ ID NO: 380 - protein, 11 aa, Artificial Sequence
  GITR(6C8)  CDR-L1
KASQNVGTNVA

SEQ ID NO: 381 - protein, 7 aa, Artificial Sequence
  GITR(6C8)  CDR-L2
SASYRYS

SEQ ID NO: 382 - protein, 9 aa, Artificial Sequence
  GITR(6C8)  CDR-L3
QQYNTDPLT

SEQ ID NO: 383 - protein, 116 aa, Artificial Sequence
  GITR(8A06)  VH
QVQLVQSGAEVKKPGSSVKVSCKASGGTFSSYAISWVRQAPGQGLEWMGGIIPIFGTANYAQKFQGRVTITADKSTSTAYMELSSLRSEDTAVYYCARGYYAIDYWGQGTTVTVSS

SEQ ID NO: 384 - protein, 107 aa, Artificial Sequence
  GITR(8A06)  VL
SSELTQDPAVSVALGQTVRITCQGDSLRSYYASWYQQKPGQAPVLVIYGKNNRPSGIPDRFSGSSSGNTASLTITGAQAEDEADYYCNSPQTSGSAVFGGGTKLTVL

SEQ ID NO: 385 - protein, 119 aa, Artificial Sequence
  GITR(6C8)  VH
QVTLRESGPALVKPTQTLTLTCTFSGFSLSTSGMGVGWIRQPPGKALEWLAHIWWDDDKYYQPSLKSRLTISKDTSKNQVVLTMTNMDPVDTATYYCARTRRYFPFAYWGQGTLVTVSS

SEQ ID NO: 386 - protein, 107 aa, Artificial Sequence
  GITR(6C8)  VL
EIVMTQSPATLSVSPGERATLSCKASQNVGTNVAWYQQKPGQAPRLLIYSASYRYSGIPARFSGSGSGTEFTLTISSLQSEDFAVYYCQQYNTDPLTFGGGTKVEIK

SEQ ID NO: 387 - DNA, 321 bp, Artificial Sequence
  DNA GITR (8A06) VL
tcgtctgagctgactcaggaccctgctgtgtctgtggccttgggacagacagtcaggatcacatgccaaggagacagcctcagaagttattatgcaagctggtaccagcagaagccaggacaggcccctgtacttgtcatctatggtaaaaacaaccggccctcagggatcccagaccgattctctggctccagctcaggaaacacagcttccttgaccatcactggggctcaggcggaagatgaggctgactattactgtaactcccctcagactagcggtagtgccgtattcggcggagggaccaagctgaccgtccta

SEQ ID NO: 388 - DNA, 348 bp, Artificial Sequence
  DNA GITR(8A06) VH
caggtgcaattggtgcagtctggggctgaggtgaagaagcctgggtcctcggtgaaggtctcctgcaaggcctccggaggcacattcagcagctacgctataagctgggtgcgacaggcccctggacaagggctcgagtggatgggagggatcatccctatctttggtacagcaaactacgcacagaagttccagggcagggtcaccattactgcagacaaatccacgagcacagcctacatggagctgagcagcctgagatctgaggacaccgccgtgtattactgtgcgagaggttactacgctatcgactactggggtcaagggaccaccgtgaccgtctcctca

SEQ ID NO: 389 - DNA, 321 bp, Artificial Sequence
  DNA GITR (6C8) VL
gagatcgtgatgacccagtcccccgccaccctgtccgtgtctccaggcgagagagccaccctgagctgcaaggcctcccagaacgtgggcaccaacgtggcctggtatcagcagaagcccggccaggcccctcggctgctgatctactccgcctcctaccggtactccggcatccctgcccggttctccggctctggctctggcaccgagtttaccctgaccatctccagcctgcagtccgaggacttcgccgtgtactactgccagcagtacaacaccgaccccctgaccttcggcggaggcaccaaggtggaaatcaaa

SEQ ID NO: 390 - DNA, 357 bp, Artificial Sequence
  DNA GITR(6C8) VH
caggtcacactgagagagtccggccctgccctggtcaagcccacccagaccctgaccctgacatgcaccttctccggcttctccctgtccacctccggcatgggcgtgggctggatcagacagcctcctggcaaggccctggaatggctggcccacatttggtgggacgacgacaagtactaccagccctccctgaagtcccggctgaccatctccaaggacacctccaagaaccaggtggtgctgaccatgaccaacatggaccccgtggacaccgccacctactactgcgcccggacccggcggtacttcccctttgcttattggggccagggcaccctggtcaccgtctcgagt

SEQ ID NO: 391 - DNA, 639 bp, Artificial Sequence
  DNA 8A06 P329GLALA IgG1 (light chain)
tcgtctgagctgactcaggaccctgctgtgtctgtggccttgggacagacagtcaggatcacatgccaaggagacagcctcagaagttattatgcaagctggtaccagcagaagccaggacaggcccctgtacttgtcatctatggtaaaaacaaccggccctcagggatcccagaccgattctctggctccagctcaggaaacacagcttccttgaccatcactggggctcaggcggaagatgaggctgactattactgtaactcccctcagactagcggtagtgccgtattcggcggagggaccaagctgaccgtcctaggtcaacccaaggctgcccccagcgtgaccctgttcccccccagcagcgaggaactgcaggccaacaaggccaccctggtctgcctgatcagcgacttctacccaggcgccgtgaccgtggcctggaaggccgacagcagccccgtgaaggccggcgtggagaccaccacccccagcaagcagagcaacaacaagtacgccgccagcagctacctgagcctgacccccgagcagtggaagagccacaggtcctacagctgccaggtgacccacgagggcagcaccgtggagaaaaccgtggcccccaccgagtgcagc

SEQ ID NO: 392 - DNA, 1338 bp, Artificial Sequence
  8A06 P329GLALA IgG1(heavy chain)
caggtgcaattggtgcagtctggggctgaggtgaagaagcctgggtcctcggtgaaggtctcctgcaaggcctccggaggcacattcagcagctacgctataagctgggtgcgacaggcccctggacaagggctcgagtggatgggagggatcatccctatctttggtacagcaaactacgcacagaagttccagggcagggtcaccattactgcagacaaatccacgagcacagcctacatggagctgagcagcctgagatctgaggacaccgccgtgtattactgtgcgagaggttactacgctatcgactactggggtcaagggaccaccgtgaccgtctcctcagctagcaccaagggcccatcggtcttccccctggcaccctcctccaagagcacctctgggggcacagcggccctgggctgcctggtcaaggactacttccccgaaccggtgacggtgtcgtggaactcaggcgccctgaccagcggcgtgcacaccttcccggctgtcctacagtcctcaggactctactccctcagcagcgtggtgaccgtgccctccagcagcttgggcacccagacctacatctgcaacgtgaatcacaagcccagcaacaccaaggtggacaagaaagttgagcccaaatcttgtgacaaaactcacacatgcccaccgtgcccagcacctgaagctgcagggggaccgtcagtcttcctcttccccccaaaacccaaggacaccctcatgatctcccggacccctgaggtcacatgcgtggtggtggacgtgagccacgaagaccctgaggtcaagttcaactggtacgtggacggcgtggaggtgcataatgccaagacaaagccgcgggaggagcagtacaacagcacgtaccgtgtggtcagcgtcctcaccgtcctgcaccaggactggctgaatggcaaggagtacaagtgcaaggtctccaacaaagccctcggcgcccccatcgagaaaaccatctccaaagccaaagggcagccccgagaaccacaggtgtacaccctgcccccatcccgggatgagctgaccaagaaccaggtcagcctgacctgcctggtcaaaggcttctatcccagcgacatcgccgtggagtgggagagcaatgggcagccggagaacaactacaagaccacgcctcccgtgctggactccgacggctccttcttcctctacagcaagctcaccgtggacaagagcaggtggcagcaggggaacgtcttctcatgctccgtgatgcatgaggctctgcacaaccactacacgcagaagagcctctccctgtctccgggtaaa

SEQ ID NO: 393 - protein, 213 aa, Artificial Sequence
  8A06 P329GLALA IgG1 (light chain)
SSELTQDPAVSVALGQTVRITCQGDSLRSYYASWYQQKPGQAPVLVIYGKNNRPSGIPDRFSGSSSGNTASLTITGAQAEDEADYYCNSPQTSGSAVFGGGTKLTVLGQPKAAPSVTLFPPSSEELQANKATLVCLISDFYPGAVTVAWKADSSPVKAGVETTTPSKQSNNKYAASSYLSLTPEQWKSHRSYSCQVTHEGSTVEKTVAPTECS

SEQ ID NO: 394 - protein, 446 aa, Artificial Sequence
  8A06 P329GLALA IgG1 (heavy chain)
QVQLVQSGAEVKKPGSSVKVSCKASGGTFSSYAISWVRQAPGQGLEWMGGIIPIFGTANYAQKFQGRVTITADKSTSTAYMELSSLRSEDTAVYYCARGYYAIDYWGQGTTVTVSSASTKGPSVFPLAPSSKSTSGGTAALGCLVKDYFPEPVTVSWNSGALTSGVHTFPAVLQSSGLYSLSSVVTVPSSSLGTQTYICNVNHKPSNTKVDKKVEPKSCDKTHTCPPCPAPEAAGGPSVFLFPPKPKDTLMISRTPEVTCVVVDVSHEDPEVKFNWYVDGVEVHNAKTKPREEQYNSTYRVVSVLTVLHQDWLNGKEYKCKVSNKALGAPIEKTISKAKGQPREPQVYTLPPSRDELTKNQVSLTCLVKGFYPSDIAVEWESNGQPENNYKTTPPVLDSDGSFFLYSKLTVDKSRWQQGNVFSCSVMHEALHNHYTQKSLSLSPGK

SEQ ID NO: 395 - DNA, 642 bp, Artificial Sequence
  DNA 6C8 P329GLALA IgG1 (light chain)
gagatcgtgatgacccagtcccccgccaccctgtccgtgtctccaggcgagagagccaccctgagctgcaaggcctcccagaacgtgggcaccaacgtggcctggtatcagcagaagcccggccaggcccctcggctgctgatctactccgcctcctaccggtactccggcatccctgcccggttctccggctctggctctggcaccgagtttaccctgaccatctccagcctgcagtccgaggacttcgccgtgtactactgccagcagtacaacaccgaccccctgaccttcggcggaggcaccaaggtggaaatcaaacgtacggtggctgcaccatctgtcttcatcttcccgccatctgatgagcagttgaaatctggaactgcctctgttgtgtgcctgctgaataacttctatcccagagaggccaaagtacagtggaaggtggataacgccctccaatcgggtaactcccaggagagtgtcacagagcaggacagcaaggacagcacctacagcctcagcagcaccctgacgctgagcaaagcagactacgagaaacacaaagtctacgcctgcgaagtcacccatcagggcctgagctcgcccgtcacaaagagcttcaacaggggagagtgt

SEQ ID NO: 396 - DNA, 1347 bp, Artificial Sequence
  DNA 6C8 P329GLALA IgG1 (heavy chain)
caggtcacactgagagagtccggccctgccctggtcaagcccacccagaccctgaccctgacatgcaccttctccggcttctccctgtccacctccggcatgggcgtgggctggatcagacagcctcctggcaaggccctggaatggctggcccacatttggtgggacgacgacaagtactaccagccctccctgaagtcccggctgaccatctccaaggacacctccaagaaccaggtggtgctgaccatgaccaacatggaccccgtggacaccgccacctactactgcgcccggacccggcggtacttcccctttgcttattggggccagggcaccctggtcaccgtctcgagtgctagcaccaagggcccatcggtcttccccctggcaccctcctccaagagcacctctgggggcacagcggccctgggctgcctggtcaaggactacttccccgaaccggtgacggtgtcgtggaactcaggcgccctgaccagcggcgtgcacaccttcccggctgtcctacagtcctcaggactctactccctcagcagcgtggtgaccgtgccctccagcagcttgggcacccagacctacatctgcaacgtgaatcacaagcccagcaacaccaaggtggacaagaaagttgagcccaaatcttgtgacaaaactcacacatgcccaccgtgcccagcacctgaagctgcagggggaccgtcagtcttcctcttccccccaaaacccaaggacaccctcatgatctcccggacccctgaggtcacatgcgtggtggtggacgtgagccacgaagaccctgaggtcaagttcaactggtacgtggacggcgtggaggtgcataatgccaagacaaagccgcgggaggagcagtacaacagcacgtaccgtgtggtcagcgtcctcaccgtcctgcaccaggactggctgaatggcaaggagtacaagtgcaaggtctccaacaaagccctcggcgcccccatcgagaaaaccatctccaaagccaaagggcagccccgagaaccacaggtgtacaccctgcccccatcccgggatgagctgaccaagaaccaggtcagcctgacctgcctggtcaaaggcttctatcccagcgacatcgccgtggagtgggagagcaatgggcagccggagaacaactacaagaccacgcctcccgtgctggactccgacggctccttcttcctctacagcaagctcaccgtggacaagagcaggtggcagcaggggaacgtcttctcatgctccgtgatgcatgaggctctgcacaaccactacacgcagaagagcctctccctgtctccgggtaaa

SEQ ID NO: 397 - protein, 214 aa, Artificial Sequence
  6C8 P329GLALA IgG1 (light chain)
EIVMTQSPATLSVSPGERATLSCKASQNVGTNVAWYQQKPGQAPRLLIYSASYRYSGIPARFSGSGSGTEFTLTISSLQSEDFAVYYCQQYNTDPLTFGGGTKVEIKRTVAAPSVFIFPPSDEQLKSGTASVVCLLNNFYPREAKVQWKVDNALQSGNSQESVTEQDSKDSTYSLSSTLTLSKADYEKHKVYACEVTHQGLSSPVTKSFNRGEC

SEQ ID NO: 398 - protein, 449 aa, Artificial Sequence
  6C8 P329GLALA IgG1 (heavy chain)
QVTLRESGPALVKPTQTLTLTCTFSGFSLSTSGMGVGWIRQPPGKALEWLAHIWWDDDKYYQPSLKSRLTISKDTSKNQVVLTMTNMDPVDTATYYCARTRRYFPFAYWGQGTLVTVSSASTKGPSVFPLAPSSKSTSGGTAALGCLVKDYFPEPVTVSWNSGALTSGVHTFPAVLQSSGLYSLSSVVTVPSSSLGTQTYICNVNHKPSNTKVDKKVEPKSCDKTHTCPPCPAPEAAGGPSVFLFPPKPKDTLMISRTPEVTCVVVDVSHEDPEVKFNWYVDGVEVHNAKTKPREEQYNSTYRVVSVLTVLHQDWLNGKEYKCKVSNKALGAPIEKTISKAKGQPREPQVYTLPPSRDELTKNQVSLTCLVKGFYPSDIAVEWESNGQPENNYKTTPPVLDSDGSFFLYSKLTVDKSRWQQGNVFSCSVMHEALHNHYTQKSLSLSPGK

SEQ ID NO: 399 - DNA, 2433 bp, Artificial Sequence
  DNA (8A06) VHCH1_VHCH1 Fc knob VH (28H1)
caggtgcagctggtgcagtctggcgccgaagtgaagaaacccggcagcagcgtgaaggtgtcctgcaaggcttccggcggcaccttcagcagctacgccatttcttgggtgcgccaggcccctggacagggcctggaatggatgggcggcatcatccccatcttcggcaccgccaactacgcccagaaattccagggcagagtgaccatcaccgccgacaagagcaccagcaccgcctacatggaactgagcagcctgcggagcgaggacaccgccgtgtactattgcgccagaggctactacgccatcgactactggggccagggcaccaccgtgaccgtgtctagcgcttctaccaagggccccagcgtgttccctctggcccctagcagcaagagcacatctggcggaacagccgccctgggctgcctcgtgaaggactactttcccgagcccgtgacagtgtcctggaactctggcgccctgacaagcggcgtgcacacctttccagccgtgctccagagcagcggcctgtactctctgagcagcgtcgtgactgtgcccagcagcagcctgggaacccagacctacatctgcaacgtgaaccacaagcccagcaacaccaaggtggacaagaaggtggaacccaagagctgcgacggcggaggcggatctggcggcggaggatcccaggtgcagctggtgcagagcggagctgaagtgaaaaagcctggctcctccgtgaaagtgtcttgtaaagccagcggcggcacattctctagctatgccatcagctgggtgcggcaggctccaggccagggactggaatggatgggaggaattatccctatttttgggacagccaattatgctcagaaatttcaggggcgcgtgacaattacagccgacaagtccacctctacagcttatatggaactgtcctccctgcgctccgaggatacagctgtgtattactgcgctcggggctattatgccattgattattggggacagggaacaacagtgactgtgtcctccgctagcaccaagggcccatcggtcttccccctggcaccctcctccaagagcacctctgggggcacagcggccctgggctgcctggtcaaggactacttccccgaaccggtgacggtgtcgtggaactcaggcgccctgaccagcggcgtgcacaccttcccggctgtcctacagtcctcaggactctactccctcagcagcgtggtgaccgtgccctccagcagcttgggcacccagacctacatctgcaacgtgaatcacaagcccagcaacaccaaggtggacaagaaagttgagcccaaatcttgtgacaaaactcacacatgcccaccgtgcccagcacctgaagctgcagggggaccgtcagtcttcctcttccccccaaaacccaaggacaccctcatgatctcccggacccctgaggtcacatgcgtggtggtggacgtgagccacgaagaccctgaggtcaagttcaactggtacgtggacggcgtggaggtgcataatgccaagacaaagccgcgggaggagcagtacaacagcacgtaccgtgtggtcagcgtcctcaccgtcctgcaccaggactggctgaatggcaaggagtacaagtgcaaggtctccaacaaagccctcggcgcccccatcgagaaaaccatctccaaagccaaagggcagccccgagaaccacaggtgtacaccctgcccccctgcagagatgagctgaccaagaaccaggtgtccctgtggtgtctggtcaagggcttctaccccagcgatatcgccgtggagtgggagagcaacggccagcctgagaacaactacaagaccaccccccctgtgctggacagcgacggcagcttcttcctgtactccaaactgaccgtggacaagagccggtggcagcagggcaacgtgttcagctgcagcgtgatgcacgaggccctgcacaaccactacacccagaagtccctgagcctgagccccggcggaggcggcggaagcggaggaggaggatccggaggagggggaagtggcggcggaggatctgaggtgcagctgctggaatccggcggaggcctggtgcagcctggcggatctctgagactgtcctgcgccgcctccggcttcaccttctcctcccacgccatgtcctgggtccgacaggctcctggcaaaggcctggaatgggtgtccgccatctgggcctccggcgagcagtactacgccgactctgtgaagggccggttcaccatctcccgggacaactccaagaacaccctgtacctgcagatgaactccctgcgggccgaggacaccgccgtgtactactgtgccaagggctggctgggcaacttcgactactggggccagggcaccctggtcaccgtgtccagc

SEQ ID NO: 400 - DNA, 2409 bp, Artificial Sequence
  DNA (8A06) VHCH1_VHCH1 Fc hole VL (28H1)
caggtgcagctggtgcagtctggcgccgaagtgaagaaacccggcagcagcgtgaaggtgtcctgcaaggcttccggcggcaccttcagcagctacgccatttcttgggtgcgccaggcccctggacagggcctggaatggatgggcggcatcatccccatcttcggcaccgccaactacgcccagaaattccagggcagagtgaccatcaccgccgacaagagcaccagcaccgcctacatggaactgagcagcctgcggagcgaggacaccgccgtgtactattgcgccagaggctactacgccatcgactactggggccagggcaccaccgtgaccgtgtctagcgcttctaccaagggccccagcgtgttccctctggcccctagcagcaagagcacatctggcggaacagccgccctgggctgcctcgtgaaggactactttcccgagcccgtgacagtgtcctggaactctggcgccctgacaagcggcgtgcacacctttccagccgtgctccagagcagcggcctgtactctctgagcagcgtcgtgactgtgcccagcagcagcctgggaacccagacctacatctgcaacgtgaaccacaagcccagcaacaccaaggtggacaagaaggtggaacccaagagctgcgacggcggaggcggatctggcggcggaggatcccaggtgcagctggtgcagagcggagctgaagtgaaaaagcctggctcctccgtgaaagtgtcttgtaaagccagcggcggcacattctctagctatgccatcagctgggtgcggcaggctccaggccagggactggaatggatgggaggaattatccctatttttgggacagccaattatgctcagaaatttcaggggcgcgtgacaattacagccgacaagtccacctctacagcttatatggaactgtcctccctgcgctccgaggatacagctgtgtattactgcgctcggggctattatgccattgattattggggacagggaacaacagtgactgtgtcctccgctagcaccaagggcccatcggtcttccccctggcaccctcctccaagagcacctctgggggcacagcggccctgggctgcctggtcaaggactacttccccgaaccggtgacggtgtcgtggaactcaggcgccctgaccagcggcgtgcacaccttcccggctgtcctacagtcctcaggactctactccctcagcagcgtggtgaccgtgccctccagcagcttgggcacccagacctacatctgcaacgtgaatcacaagcccagcaacaccaaggtggacaagaaagttgagcccaaatcttgtgacaaaactcacacatgcccaccgtgcccagcacctgaagctgcagggggaccgtcagtcttcctcttccccccaaaacccaaggacaccctcatgatctcccggacccctgaggtcacatgcgtggtggtggacgtgagccacgaagaccctgaggtcaagttcaactggtacgtggacggcgtggaggtgcataatgccaagacaaagccgcgggaggagcagtacaacagcacgtaccgtgtggtcagcgtcctcaccgtcctgcaccaggactggctgaatggcaaggagtacaagtgcaaggtctccaacaaagccctcggcgcccccatcgagaaaaccatctccaaagccaaagggcagccccgagaaccacaggtgtgcaccctgcccccatcccgggatgagctgaccaagaaccaggtcagcctctcgtgcgcagtcaaaggcttctatcccagcgacatcgccgtggagtgggagagcaatgggcagccggagaacaactacaagaccacgcctcccgtgctggactccgacggctccttcttcctcgtgagcaagctcaccgtggacaagagcaggtggcagcaggggaacgtcttctcatgctccgtgatgcatgaggctctgcacaaccactacacgcagaagagcctctccctgtctccgggtggaggcggcggaagcggaggaggaggatccggtggtggcggatctgggggcggtggatctgagatcgtgctgacccagtctcccggcaccctgagcctgagccctggcgagagagccaccctgagctgcagagccagccagagcgtgagccggagctacctggcctggtatcagcagaagcccggccaggcccccagactgctgatcatcggcgccagcacccgggccaccggcatccccgatagattcagcggcagcggctccggcaccgacttcaccctgaccatcagccggctggaacccgaggacttcgccgtgtactactgccagcagggccaggtgatcccccccaccttcggccagggcaccaaggtggaaatcaag

SEQ ID NO: 401 - protein, 811 aa, Artificial Sequence
  (8A06) VHCH1_VHCH1 Fc knob VH (28H1)
QVQLVQSGAEVKKPGSSVKVSCKASGGTFSSYAISWVRQAPGQGLEWMGGIIPIFGTANYAQKFQGRVTITADKSTSTAYMELSSLRSEDTAVYYCARGYYAIDYWGQGTTVTVSSASTKGPSVFPLAPSSKSTSGGTAALGCLVKDYFPEPVTVSWNSGALTSGVHTFPAVLQSSGLYSLSSVVTVPSSSLGTQTYICNVNHKPSNTKVDKKVEPKSCDGGGGSGGGGSQVQLVQSGAEVKKPGSSVKVSCKASGGTFSSYAISWVRQAPGQGLEWMGGIIPIFGTANYAQKFQGRVTITADKSTSTAYMELSSLRSEDTAVYYCARGYYAIDYWGQGTTVTVSSASTKGPSVFPLAPSSKSTSGGTAALGCLVKDYFPEPVTVSWNSGALTSGVHTFPAVLQSSGLYSLSSVVTVPSSSLGTQTYICNVNHKPSNTKVDKKVEPKSCDKTHTCPPCPAPEAAGGPSVFLFPPKPKDTLMISRTPEVTCVVVDVSHEDPEVKFNWYVDGVEVHNAKTKPREEQYNSTYRVVSVLTVLHQDWLNGKEYKCKVSNKALGAPIEKTISKAKGQPREPQVYTLPPCRDELTKNQVSLWCLVKGFYPSDIAVEWESNGQPENNYKTTPPVLDSDGSFFLYSKLTVDKSRWQQGNVFSCSVMHEALHNHYTQKSLSLSPGGGGGSGGGGSGGGGSGGGGSEVQLLESGGGLVQPGGSLRLSCAASGFTFSSHAMSWVRQAPGKGLEWVSAIWASGEQYYADSVKGRFTISRDNSKNTLYLQMNSLRAEDTAVYYCAKGWLGNFDYWGQGTLVTVSS

SEQ ID NO: 402 - protein, 803 aa, Artificial Sequence
  (8A06) VHCH1_VHCH1 Fc hole VL (28H1)
QVQLVQSGAEVKKPGSSVKVSCKASGGTFSSYAISWVRQAPGQGLEWMGGIIPIFGTANYAQKFQGRVTITADKSTSTAYMELSSLRSEDTAVYYCARGYYAIDYWGQGTTVTVSSASTKGPSVFPLAPSSKSTSGGTAALGCLVKDYFPEPVTVSWNSGALTSGVHTFPAVLQSSGLYSLSSVVTVPSSSLGTQTYICNVNHKPSNTKVDKKVEPKSCDGGGGSGGGGSQVQLVQSGAEVKKPGSSVKVSCKASGGTFSSYAISWVRQAPGQGLEWMGGIIPIFGTANYAQKFQGRVTITADKSTSTAYMELSSLRSEDTAVYYCARGYYAIDYWGQGTTVTVSSASTKGPSVFPLAPSSKSTSGGTAALGCLVKDYFPEPVTVSWNSGALTSGVHTFPAVLQSSGLYSLSSVVTVPSSSLGTQTYICNVNHKPSNTKVDKKVEPKSCDKTHTCPPCPAPEAAGGPSVFLFPPKPKDTLMISRTPEVTCVVVDVSHEDPEVKFNWYVDGVEVHNAKTKPREEQYNSTYRVVSVLTVLHQDWLNGKEYKCKVSNKALGAPIEKTISKAKGQPREPQVCTLPPSRDELTKNQVSLSCAVKGFYPSDIAVEWESNGQPENNYKTTPPVLDSDGSFFLVSKLTVDKSRWQQGNVFSCSVMHEALHNHYTQKSLSLSPGGGGGSGGGGSGGGGSGGGGSEIVLTQSPGTLSLSPGERATLSCRASQSVSRSYLAWYQQKPGQAPRLLIIGASTRATGIPDRFSGSGSGTDFTLTISRLEPEDFAVYYCQQGQVIPPTFGQGTKVEIK

SEQ ID NO: 403 - DNA, 2451 bp, Artificial Sequence
  DNA (6C8) VHCH1_VHCH1 Fc knob VH (28H1)
caggtcacactgagagagtccggccctgccctggtcaagcccacccagaccctgaccctgacatgcaccttctccggcttctccctgtccacctccggcatgggcgtgggctggatcagacagcctcctggcaaggccctggaatggctggcccacatttggtgggacgacgacaagtactaccagccctccctgaagtcccggctgaccatctccaaggacacctccaagaaccaggtggtgctgaccatgaccaacatggaccccgtggacaccgccacctactactgcgcccggacccggcggtacttcccctttgcttattggggccagggcaccctggtcaccgtctcgagcgcttctaccaagggccccagcgtgttccctctggcccctagcagcaagagcacatctggcggaacagccgccctgggctgcctcgtgaaggactactttcccgagcccgtgacagtgtcctggaactctggcgccctgacaagcggcgtgcacacctttccagccgtgctccagagcagcggcctgtactctctgagcagcgtcgtgactgtgcccagcagcagcctgggaacccagacctacatctgcaacgtgaaccacaagcccagcaacaccaaggtggacaagaaggtggaacccaagagctgcgacggcggaggcggatctggcggcggaggatcccaggtcacactgagagagtccggccctgccctggtcaagcccacccagaccctgaccctgacatgcaccttctccggcttctccctgtccacctccggcatgggcgtgggctggatcagacagcctcctggcaaggccctggaatggctggcccacatttggtgggacgacgacaagtactaccagccctccctgaagtcccggctgaccatctccaaggacacctccaagaaccaggtggtgctgaccatgaccaacatggaccccgtggacaccgccacctactactgcgcccggacccggcggtacttcccctttgcttattggggccagggcaccctggtcaccgtctcgagtgctagcaccaagggcccatcggtcttccccctggcaccctcctccaagagcacctctgggggcacagcggccctgggctgcctggtcaaggactacttccccgaaccggtgacggtgtcgtggaactcaggcgccctgaccagcggcgtgcacaccttcccggctgtcctacagtcctcaggactctactccctcagcagcgtggtgaccgtgccctccagcagcttgggcacccagacctacatctgcaacgtgaatcacaagcccagcaacaccaaggtggacaagaaagttgagcccaaatcttgtgacaaaactcacacatgcccaccgtgcccagcacctgaagctgcagggggaccgtcagtcttcctcttccccccaaaacccaaggacaccctcatgatctcccggacccctgaggtcacatgcgtggtggtggacgtgagccacgaagaccctgaggtcaagttcaactggtacgtggacggcgtggaggtgcataatgccaagacaaagccgcgggaggagcagtacaacagcacgtaccgtgtggtcagcgtcctcaccgtcctgcaccaggactggctgaatggcaaggagtacaagtgcaaggtctccaacaaagccctcggcgcccccatcgagaaaaccatctccaaagccaaagggcagccccgagaaccacaggtgtacaccctgcccccctgcagagatgagctgaccaagaaccaggtgtccctgtggtgtctggtcaagggcttctaccccagcgatatcgccgtggagtgggagagcaacggccagcctgagaacaactacaagaccaccccccctgtgctggacagcgacggcagcttcttcctgtactccaaactgaccgtggacaagagccggtggcagcagggcaacgtgttcagctgcagcgtgatgcacgaggccctgcacaaccactacacccagaagtccctgagcctgagccccggcggaggcggcggaagcggaggaggaggatccggaggagggggaagtggcggcggaggatctgaggtgcagctgctggaatccggcggaggcctggtgcagcctggcggatctctgagactgtcctgcgccgcctccggcttcaccttctcctcccacgccatgtcctgggtccgacaggctcctggcaaaggcctggaatgggtgtccgccatctgggcctccggcgagcagtactacgccgactctgtgaagggccggttcaccatctcccgggacaactccaagaacaccctgtacctgcagatgaactccctgcgggccgaggacaccgccgtgtactactgtgccaagggctggctgggcaacttcgactactggggccagggcaccctggtcaccgtgtccagc

SEQ ID NO: 404 - DNA, 2427 bp, Artificial Sequence
  DNA (6C8) VHCH1_VHCH1 Fc hole VL (28H1)
caggtcacactgagagagtccggccctgccctggtcaagcccacccagaccctgaccctgacatgcaccttctccggcttctccctgtccacctccggcatgggcgtgggctggatcagacagcctcctggcaaggccctggaatggctggcccacatttggtgggacgacgacaagtactaccagccctccctgaagtcccggctgaccatctccaaggacacctccaagaaccaggtggtgctgaccatgaccaacatggaccccgtggacaccgccacctactactgcgcccggacccggcggtacttcccctttgcttattggggccagggcaccctggtcaccgtctcgagcgcttctaccaagggccccagcgtgttccctctggcccctagcagcaagagcacatctggcggaacagccgccctgggctgcctcgtgaaggactactttcccgagcccgtgacagtgtcctggaactctggcgccctgacaagcggcgtgcacacctttccagccgtgctccagagcagcggcctgtactctctgagcagcgtcgtgactgtgcccagcagcagcctgggaacccagacctacatctgcaacgtgaaccacaagcccagcaacaccaaggtggacaagaaggtggaacccaagagctgcgacggcggaggcggatctggcggcggaggatcccaggtcacactgagagagtccggccctgccctggtcaagcccacccagaccctgaccctgacatgcaccttctccggcttctccctgtccacctccggcatgggcgtgggctggatcagacagcctcctggcaaggccctggaatggctggcccacatttggtgggacgacgacaagtactaccagccctccctgaagtcccggctgaccatctccaaggacacctccaagaaccaggtggtgctgaccatgaccaacatggaccccgtggacaccgccacctactactgcgcccggacccggcggtacttcccctttgcttattggggccagggcaccctggtcaccgtctcgagtgctagcaccaagggcccatcggtcttccccctggcaccctcctccaagagcacctctgggggcacagcggccctgggctgcctggtcaaggactacttccccgaaccggtgacggtgtcgtggaactcaggcgccctgaccagcggcgtgcacaccttcccggctgtcctacagtcctcaggactctactccctcagcagcgtggtgaccgtgccctccagcagcttgggcacccagacctacatctgcaacgtgaatcacaagcccagcaacaccaaggtggacaagaaagttgagcccaaatcttgtgacaaaactcacacatgcccaccgtgcccagcacctgaagctgcagggggaccgtcagtcttcctcttccccccaaaacccaaggacaccctcatgatctcccggacccctgaggtcacatgcgtggtggtggacgtgagccacgaagaccctgaggtcaagttcaactggtacgtggacggcgtggaggtgcataatgccaagacaaagccgcgggaggagcagtacaacagcacgtaccgtgtggtcagcgtcctcaccgtcctgcaccaggactggctgaatggcaaggagtacaagtgcaaggtctccaacaaagccctcggcgcccccatcgagaaaaccatctccaaagccaaagggcagccccgagaaccacaggtgtgcaccctgcccccatcccgggatgagctgaccaagaaccaggtcagcctctcgtgcgcagtcaaaggcttctatcccagcgacatcgccgtggagtgggagagcaatgggcagccggagaacaactacaagaccacgcctcccgtgctggactccgacggctccttcttcctcgtgagcaagctcaccgtggacaagagcaggtggcagcaggggaacgtcttctcatgctccgtgatgcatgaggctctgcacaaccactacacgcagaagagcctctccctgtctccgggtggaggcggcggaagcggaggaggaggatccggtggtggcggatctgggggcggtggatctgagatcgtgctgacccagtctcccggcaccctgagcctgagccctggcgagagagccaccctgagctgcagagccagccagagcgtgagccggagctacctggcctggtatcagcagaagcccggccaggcccccagactgctgatcatcggcgccagcacccgggccaccggcatccccgatagattcagcggcagcggctccggcaccgacttcaccctgaccatcagccggctggaacccgaggacttcgccgtgtactactgccagcagggccaggtgatcccccccaccttcggccagggcaccaaggtggaaatcaag

SEQ ID NO: 405 - protein, 817 aa, Artificial Sequence
  (6C8) VHCH1_VHCH1 Fc knob VH (28H1)
QVTLRESGPALVKPTQTLTLTCTFSGFSLSTSGMGVGWIRQPPGKALEWLAHIWWDDDKYYQPSLKSRLTISKDTSKNQVVLTMTNMDPVDTATYYCARTRRYFPFAYWGQGTLVTVSSASTKGPSVFPLAPSSKSTSGGTAALGCLVKDYFPEPVTVSWNSGALTSGVHTFPAVLQSSGLYSLSSVVTVPSSSLGTQTYICNVNHKPSNTKVDKKVEPKSCDGGGGSGGGGSQVTLRESGPALVKPTQTLTLTCTFSGFSLSTSGMGVGWIRQPPGKALEWLAHIWWDDDKYYQPSLKSRLTISKDTSKNQVVLTMTNMDPVDTATYYCARTRRYFPFAYWGQGTLVTVSSASTKGPSVFPLAPSSKSTSGGTAALGCLVKDYFPEPVTVSWNSGALTSGVHTFPAVLQSSGLYSLSSVVTVPSSSLGTQTYICNVNHKPSNTKVDKKVEPKSCDKTHTCPPCPAPEAAGGPSVFLFPPKPKDTLMISRTPEVTCVVVDVSHEDPEVKFNWYVDGVEVHNAKTKPREEQYNSTYRVVSVLTVLHQDWLNGKEYKCKVSNKALGAPIEKTISKAKGQPREPQVYTLPPCRDELTKNQVSLWCLVKGFYPSDIAVEWESNGQPENNYKTTPPVLDSDGSFFLYSKLTVDKSRWQQGNVFSCSVMHEALHNHYTQKSLSLSPGGGGGSGGGGSGGGGSGGGGSEVQLLESGGGLVQPGGSLRLSCAASGFTFSSHAMSWVRQAPGKGLEWVSAIWASGEQYYADSVKGRFTISRDNSKNTLYLQMNSLRAEDTAVYYCAKGWLGNFDYWGQGTLVTVSS

SEQ ID NO: 406 - protein, 809 aa, Artificial Sequence
  (6C8) VHCH1_VHCH1 Fc hole VL (28H1)
QVTLRESGPALVKPTQTLTLTCTFSGFSLSTSGMGVGWIRQPPGKALEWLAHIWWDDDKYYQPSLKSRLTISKDTSKNQVVLTMTNMDPVDTATYYCARTRRYFPFAYWGQGTLVTVSSASTKGPSVFPLAPSSKSTSGGTAALGCLVKDYFPEPVTVSWNSGALTSGVHTFPAVLQSSGLYSLSSVVTVPSSSLGTQTYICNVNHKPSNTKVDKKVEPKSCDGGGGSGGGGSQVTLRESGPALVKPTQTLTLTCTFSGFSLSTSGMGVGWIRQPPGKALEWLAHIWWDDDKYYQPSLKSRLTISKDTSKNQVVLTMTNMDPVDTATYYCARTRRYFPFAYWGQGTLVTVSSASTKGPSVFPLAPSSKSTSGGTAALGCLVKDYFPEPVTVSWNSGALTSGVHTFPAVLQSSGLYSLSSVVTVPSSSLGTQTYICNVNHKPSNTKVDKKVEPKSCDKTHTCPPCPAPEAAGGPSVFLFPPKPKDTLMISRTPEVTCVVVDVSHEDPEVKFNWYVDGVEVHNAKTKPREEQYNSTYRVVSVLTVLHQDWLNGKEYKCKVSNKALGAPIEKTISKAKGQPREPQVCTLPPSRDELTKNQVSLSCAVKGFYPSDIAVEWESNGQPENNYKTTPPVLDSDGSFFLVSKLTVDKSRWQQGNVFSCSVMHEALHNHYTQKSLSLSPGGGGGSGGGGSGGGGSGGGGSEIVLTQSPGTLSLSPGERATLSCRASQSVSRSYLAWYQQKPGQAPRLLIIGASTRATGIPDRFSGSGSGTDFTLTISRLEPEDFAVYYCQQGQVIPPTFGQGTKVEIK

SEQ ID NO: 407 - DNA, 2754 bp, Artificial Sequence
  DNA (8A06) VHCH1_VHCH1Fc VHCL (28H1)
caggtgcagctggtgcagtctggcgccgaagtgaagaaacccggcagcagcgtgaaggtgtcctgcaaggcttccggcggcaccttcagcagctacgccatttcttgggtgcgccaggcccctggacagggcctggaatggatgggcggcatcatccccatcttcggcaccgccaactacgcccagaaattccagggcagagtgaccatcaccgccgacaagagcaccagcaccgcctacatggaactgagcagcctgcggagcgaggacaccgccgtgtactattgcgccagaggctactacgccatcgactactggggccagggcaccaccgtgaccgtgtctagcgcttctaccaagggccccagcgtgttccctctggcccctagcagcaagagcacatctggcggaacagccgccctgggctgcctcgtgaaggactactttcccgagcccgtgacagtgtcctggaactctggcgccctgacaagcggcgtgcacacctttccagccgtgctccagagcagcggcctgtactctctgagcagcgtcgtgactgtgcccagcagcagcctgggaacccagacctacatctgcaacgtgaaccacaagcccagcaacaccaaggtggacaagaaggtggaacccaagagctgcgacggcggaggcggatctggcggcggaggatcccaggtgcagctggtgcagagcggagctgaagtgaaaaagcctggctcctccgtgaaagtgtcttgtaaagccagcggcggcacattctctagctatgccatcagctgggtgcggcaggctccaggccagggactggaatggatgggaggaattatccctatttttgggacagccaattatgctcagaaatttcaggggcgcgtgacaattacagccgacaagtccacctctacagcttatatggaactgtcctccctgcgctccgaggatacagctgtgtattactgcgctcggggctattatgccattgattattggggacagggaacaacagtgactgtgtcctccgctagcaccaagggcccatccgtgttccctctggccccttccagcaagtctacctctggcggcacagccgctctgggctgcctcgtgaaggactacttccccgagcctgtgacagtgtcctggaactctggcgccctgacatccggcgtgcacacctttccagctgtgctgcagtcctccggcctgtactccctgtcctccgtcgtgacagtgccctccagctctctgggcacccagacctacatctgcaacgtgaaccacaagccctccaacaccaaggtggacaagaaggtggaacccaagtcctgcgacaagacccacacctgtcccccttgtcctgcccctgaagctgctggcggccctagcgtgttcctgttccccccaaagcccaaggacaccctgatgatctcccggacccccgaagtgacctgcgtggtggtggatgtgtcccacgaggaccctgaagtgaagttcaattggtacgtggacggcgtggaagtgcacaatgccaagaccaagcctagagaggaacagtacaactccacctaccgggtggtgtccgtgctgaccgtgctgcaccaggattggctgaacggcaaagagtacaagtgcaaggtgtccaacaaggccctgggagcccccatcgaaaagaccatctccaaggccaagggccagcctcgcgagcctcaggtgtacaccctgccccctagcagagatgagctgaccaagaaccaggtgtccctgacctgtctcgtgaaaggcttctacccctccgatatcgccgtggaatgggagagcaacggccagcccgagaacaactacaagaccaccccccctgtgctggactccgacggctcattcttcctgtactctaagctgacagtggacaagtcccggtggcagcagggcaacgtgttctcctgctccgtgatgcacgaggccctgcacaaccactacacccagaagtccctgtccctgtctcccgggggaggcggaggatctggcggaggcggatccggtggtggcggatctgggggcggtggatctgaggtgcagctgctggaatctgggggaggactggtgcagccaggcggatctctgaggctgtcctgcgctgcttccggctttaccttctccagccacgccatgagttgggtgcgccaggcacccggaaaaggactggaatgggtgtcagccatctgggcctccggcgagcagtactacgccgatagcgtgaagggccggttcaccatctctcgggataacagcaagaatactctgtacctgcagatgaactccctgcgcgctgaagataccgctgtgtattactgcgccaagggctggctgggcaacttcgattactggggccagggaaccctcgtgactgtctcgagcgcttctgtggccgctccctccgtgttcatcttcccaccttccgacgagcagctgaagtccggcactgcctctgtcgtgtgcctgctgaacaacttctaccctcgggaagccaaggtgcagtggaaagtggataacgccctgcagtccggcaactcccaggaatccgtgaccgagcaggactccaaggacagcacctactccctgagcagcaccctgaccctgtccaaggccgactacgagaagcacaaggtgtacgcctgtgaagtgacccaccagggcctgtccagccccgtgaccaagtccttcaaccggggcgagtgc

SEQ ID NO: 408 - DNA, 639 bp, Artificial Sequence
  DNA (28H1) VLCH1- light chain
gagatcgtgctgacccagtctcccggcaccctgagcctgagccctggcgagagagccaccctgagctgcagagccagccagagcgtgagccggagctacctggcctggtatcagcagaagcccggccaggcccccagactgctgatcatcggcgccagcacccgggccaccggcatccccgatagattcagcggcagcggctccggcaccgacttcaccctgaccatcagccggctggaacccgaggacttcgccgtgtactactgccagcagggccaggtgatcccccccaccttcggccagggcaccaaggtggaaatcaagagcagcgcttccaccaaaggcccttccgtgtttcctctggctcctagctccaagtccacctctggaggcaccgctgctctcggatgcctcgtgaaggattattttcctgagcctgtgacagtgtcctggaatagcggagcactgacctctggagtgcatactttccccgctgtgctgcagtcctctggactgtacagcctgagcagcgtggtgacagtgcccagcagcagcctgggcacccagacctacatctgcaacgtgaaccacaagcccagcaacaccaaggtggacaagaaggtggaacccaagtcttgt

SEQ ID NO: 409 - protein, 918 aa, Artificial Sequence
  (8A06) VHCH1_VHCH1Fc VHCL (28H1)
QVQLVQSGAEVKKPGSSVKVSCKASGGTFSSYAISWVRQAPGQGLEWMGGIIPIFGTANYAQKFQGRVTITADKSTSTAYMELSSLRSEDTAVYYCARGYYAIDYWGQGTTVTVSSASTKGPSVFPLAPSSKSTSGGTAALGCLVKDYFPEPVTVSWNSGALTSGVHTFPAVLQSSGLYSLSSVVTVPSSSLGTQTYICNVNHKPSNTKVDKKVEPKSCDGGGGSGGGGSQVQLVQSGAEVKKPGSSVKVSCKASGGTFSSYAISWVRQAPGQGLEWMGGIIPIFGTANYAQKFQGRVTITADKSTSTAYMELSSLRSEDTAVYYCARGYYAIDYWGQGTTVTVSSASTKGPSVFPLAPSSKSTSGGTAALGCLVKDYFPEPVTVSWNSGALTSGVHTFPAVLQSSGLYSLSSVVTVPSSSLGTQTYICNVNHKPSNTKVDKKVEPKSCDKTHTCPPCPAPEAAGGPSVFLFPPKPKDTLMISRTPEVTCVVVDVSHEDPEVKFNWYVDGVEVHNAKTKPREEQYNSTYRVVSVLTVLHQDWLNGKEYKCKVSNKALGAPIEKTISKAKGQPREPQVYTLPPSRDELTKNQVSLTCLVKGFYPSDIAVEWESNGQPENNYKTTPPVLDSDGSFFLYSKLTVDKSRWQQGNVFSCSVMHEALHNHYTQKSLSLSPGGGGGSGGGGSGGGGSGGGGSEVQLLESGGGLVQPGGSLRLSCAASGFTFSSHAMSWVRQAPGKGLEWVSAIWASGEQYYADSVKGRFTISRDNSKNTLYLQMNSLRAEDTAVYYCAKGWLGNFDYWGQGTLVTVSSASVAAPSVFIFPPSDEQLKSGTASVVCLLNNFYPREAKVQWKVDNALQSGNSQESVTEQDSKDSTYSLSSTLTLSKADYEKHKVYACEVTHQGLSSPVTKSFNRGEC

SEQ ID NO: 410 - protein, 213 aa, Artificial Sequence
  (28H1) VLCH1- light chain
EIVLTQSPGTLSLSPGERATLSCRASQSVSRSYLAWYQQKPGQAPRLLIIGASTRATGIPDRFSGSGSGTDFTLTISRLEPEDFAVYYCQQGQVIPPTFGQGTKVEIKSSASTKGPSVFPLAPSSKSTSGGTAALGCLVKDYFPEPVTVSWNSGALTSGVHTFPAVLQSSGLYSLSSVVTVPSSSLGTQTYICNVNHKPSNTKVDKKVEPKSC

SEQ ID NO: 411 - DNA, 2772 bp, Artificial Sequence
  DNA (6C8) VHCH1_VHCH1Fc VHCL (28H1)
caggtcacactgagagagtccggccctgccctggtcaagcccacccagaccctgaccctgacatgcaccttctccggcttctccctgtccacctccggcatgggcgtgggctggatcagacagcctcctggcaaggccctggaatggctggcccacatttggtgggacgacgacaagtactaccagccctccctgaagtcccggctgaccatctccaaggacacctccaagaaccaggtggtgctgaccatgaccaacatggaccccgtggacaccgccacctactactgcgcccggacccggcggtacttcccctttgcttattggggccagggcaccctggtcaccgtctcgagcgcttctaccaagggccccagcgtgttccctctggcccctagcagcaagagcacatctggcggaacagccgccctgggctgcctcgtgaaggactactttcccgagcccgtgacagtgtcctggaactctggcgccctgacaagcggcgtgcacacctttccagccgtgctccagagcagcggcctgtactctctgagcagcgtcgtgactgtgcccagcagcagcctgggaacccagacctacatctgcaacgtgaaccacaagcccagcaacaccaaggtggacaagaaggtggaacccaagagctgcgacggcggaggcggatctggcggcggaggatcccaggtcacactgagagagtccggccctgccctggtcaagcccacccagaccctgaccctgacatgcaccttctccggcttctccctgtccacctccggcatgggcgtgggctggatcagacagcctcctggcaaggccctggaatggctggcccacatttggtgggacgacgacaagtactaccagccctccctgaagtcccggctgaccatctccaaggacacctccaagaaccaggtggtgctgaccatgaccaacatggaccccgtggacaccgccacctactactgcgcccggacccggcggtacttcccctttgcttattggggccagggcaccctggtcaccgtctcgagtgctagcaccaagggcccatccgtgttccctctggccccttccagcaagtctacctctggcggcacagccgctctgggctgcctcgtgaaggactacttccccgagcctgtgacagtgtcctggaactctggcgccctgacatccggcgtgcacacctttccagctgtgctgcagtcctccggcctgtactccctgtcctccgtcgtgacagtgccctccagctctctgggcacccagacctacatctgcaacgtgaaccacaagccctccaacaccaaggtggacaagaaggtggaacccaagtcctgcgacaagacccacacctgtcccccttgtcctgcccctgaagctgctggcggccctagcgtgttcctgttccccccaaagcccaaggacaccctgatgatctcccggacccccgaagtgacctgcgtggtggtggatgtgtcccacgaggaccctgaagtgaagttcaattggtacgtggacggcgtggaagtgcacaatgccaagaccaagcctagagaggaacagtacaactccacctaccgggtggtgtccgtgctgaccgtgctgcaccaggattggctgaacggcaaagagtacaagtgcaaggtgtccaacaaggccctgggagcccccatcgaaaagaccatctccaaggccaagggccagcctcgcgagcctcaggtgtacaccctgccccctagcagagatgagctgaccaagaaccaggtgtccctgacctgtctcgtgaaaggcttctacccctccgatatcgccgtggaatgggagagcaacggccagcccgagaacaactacaagaccaccccccctgtgctggactccgacggctcattcttcctgtactctaagctgacagtggacaagtcccggtggcagcagggcaacgtgttctcctgctccgtgatgcacgaggccctgcacaaccactacacccagaagtccctgtccctgtctcccgggggaggcggaggatctggcggaggcggatccggtggtggcggatctgggggcggtggatctgaggtgcagctgctggaatctgggggaggactggtgcagccaggcggatctctgaggctgtcctgcgctgcttccggctttaccttctccagccacgccatgagttgggtgcgccaggcacccggaaaaggactggaatgggtgtcagccatctgggcctccggcgagcagtactacgccgatagcgtgaagggccggttcaccatctctcgggataacagcaagaatactctgtacctgcagatgaactccctgcgcgctgaagataccgctgtgtattactgcgccaagggctggctgggcaacttcgattactggggccagggaaccctcgtgactgtctcgagcgcttctgtggccgctccctccgtgttcatcttcccaccttccgacgagcagctgaagtccggcactgcctctgtcgtgtgcctgctgaacaacttctaccctcgggaagccaaggtgcagtggaaagtggataacgccctgcagtccggcaactcccaggaatccgtgaccgagcaggactccaaggacagcacctactccctgagcagcaccctgaccctgtccaaggccgactacgagaagcacaaggtgtacgcctgtgaagtgacccaccagggcctgtccagccccgtgaccaagtccttcaaccggggcgagtgc

SEQ ID NO: 412 - protein, 924 aa, Artificial Sequence
  (6C8) VHCH1_VHCH1Fc VHCL (28H1)
QVTLRESGPALVKPTQTLTLTCTFSGFSLSTSGMGVGWIRQPPGKALEWLAHIWWDDDKYYQPSLKSRLTISKDTSKNQVVLTMTNMDPVDTATYYCARTRRYFPFAYWGQGTLVTVSSASTKGPSVFPLAPSSKSTSGGTAALGCLVKDYFPEPVTVSWNSGALTSGVHTFPAVLQSSGLYSLSSVVTVPSSSLGTQTYICNVNHKPSNTKVDKKVEPKSCDGGGGSGGGGSQVTLRESGPALVKPTQTLTLTCTFSGFSLSTSGMGVGWIRQPPGKALEWLAHIWWDDDKYYQPSLKSRLTISKDTSKNQVVLTMTNMDPVDTATYYCARTRRYFPFAYWGQGTLVTVSSASTKGPSVFPLAPSSKSTSGGTAALGCLVKDYFPEPVTVSWNSGALTSGVHTFPAVLQSSGLYSLSSVVTVPSSSLGTQTYICNVNHKPSNTKVDKKVEPKSCDKTHTCPPCPAPEAAGGPSVFLFPPKPKDTLMISRTPEVTCVVVDVSHEDPEVKFNWYVDGVEVHNAKTKPREEQYNSTYRVVSVLTVLHQDWLNGKEYKCKVSNKALGAPIEKTISKAKGQPREPQVYTLPPSRDELTKNQVSLTCLVKGFYPSDIAVEWESNGQPENNYKTTPPVLDSDGSFFLYSKLTVDKSRWQQGNVFSCSVMHEALHNHYTQKSLSLSPGGGGGSGGGGSGGGGSGGGGSEVQLLESGGGLVQPGGSLRLSCAASGFTFSSHAMSWVRQAPGKGLEWVSAIWASGEQYYADSVKGRFTISRDNSKNTLYLQMNSLRAEDTAVYYCAKGWLGNFDYWGQGTLVTVSSASVAAPSVFIFPPSDEQLKSGTASVVCLLNNFYPREAKVQWKVDNALQSGNSQESVTEQDSKDSTYSLSSTLTLSKADYEKHKVYACEVTHQGLSSPVTKSFNRGEC
